(19) United States
(12) Patent Application Publication
(10) Pub. No.: US 2007/0148676 A1
(43) Pub. Date: Jun. 28, 2007

(54) Methods for detecting gene expression in peripheral blood cells and uses thereof

(76) Inventors: Sylvia G. Kachalsky, Gan Yavne (IL); Guy Horev, Rehovot (IL)

Correspondence Address: WINSTON & STRAWN LLP;PATENT DEPARTMENT, 1700 K STREET, N.W., WASHINGTON, DC, 20006, US

(21) Appl. No.: 11/633,063

(22) Filed: Dec. 1, 2006

Related U.S. Application Data
(63) Continuation of application No. PCT/IL05/00590, filed on Jun. 5, 2005.
(60) Provisional application No. 60/576,599, filed on Jun. 4, 2004.

(51) Int. Cl. C12Q 1/68

(52) U.S. Cl. 435/6

(57) ABSTRACT

The present invention relates to methods of identifying biomarkers for disease by measuring gene expression levels in subpopulations of blood cells obtained from subjects of closed populations. Particularly, the present invention relates to methods of diagnosing, monitoring and prognosing diseases by determining expression levels of disease-specific genes.

### CROSS-REFERENCE TO RELATED APPLICATIONS

[0001] This application is a continuation of International application PCT/IL2005/000590 Filed Jun. 5, 2005, which claims the benefit of provisional application 60/576,599 filed Jun. 4, 2004, the entire content of each of which is expressly incorporated herein by reference thereto.

### FIELD OF THE INVENTION

[0002] The present invention relates to methods of identifying biomarkers for a disease, which comprise measuring gene expression levels in subpopulations of blood cells obtained from subjects of closed populations. Particularly, the present invention relates to methods of diagnosing and prognosing diseases comprising determining expression levels of disease-specific genes.

### BACKGROUND OF THE INVENTION

[0003] The functional changes in the immune system enable it to specifically react to any given challenge to the healthy steady state of the body. The immune system and its constantly circulating white blood cells or leukocytes, are in constant interaction with the different tissues in the body. Given any patho-physiological stimulus, peripheral circulating leukocytes detect and specifically react based on their ability to measure the normal or steady state body situation. This specific reaction can be measured by means of functional genomics and proteomics. In schizophrenia, for example, the expression level of dopamine receptors, which are known to be associated with a number of neuropathological disorders, has been shown to be higher in lymphocytes of schizophrenia patients than in healthy individuals (Hani, T. et al., Proc. Natl. Acad. Sci. USA 98: 625-628, 2001). Positive correlation between the expression of a gene and a particular disease has been also documented for other diseases such as heart failure disease and hypertension.

[0004] While many studies have been aimed at identifying changes in expression of individual genes, there is a growing awareness that many diseases affect the expression of a large number of genes. In cases where the genes participate in the same signaling pathway, the involvement of these genes may be expected. However, in cases where the genes participate in separate signaling pathways, the involvement of these genes is totally unexpected. DNA-based arrays can provide a simple way to explore simultaneously and accurately the expression of a large number of genes.

[0005] cDNA-based arrays have been used to profile complex diseases and discover novel disease-related genes. In rheumatoid arthritis, the expression patterns of selected genes in tissue samples as detected by cDNA-based arrays have been shown to be different from the expression patterns obtained from tissue samples of individuals having other inflammatory diseases (Heller R. A., et al. Proc. Natl. Acad. Sci. USA 94: 2150-2155, 1997). Variations in gene expression in peripheral blood mononuclear cells have been documented in atopy and asthma and a composite atopy gene expression (CAGE) score was determined by using 10 genes dysregulated in atopic individuals according to a specific algorithm (Brutsche, M. H., et al., J. Allergy Clin. Immunol. 109: 271-273, 2002). Gene expression profiles for myeloma and cardiovascular diseases have been also documented in leukocytes (see, for example, Claudio, J. O., et al., Blood 100: 2175-2186, 2002). Recently, application of genome-wide expression analysis in leukocytes to study human diseases has been documented (Cobb, J. P., et. al., Proc. Natl. Acad. Sci. USA 102: 4801-4806, 2005).

[0006] International Patent Application WO 2004/112589 relates to the identification of biomarkers in blood samples for different diseases. The methods for identifying a biomarker for a disease according to WO 2004/112589 comprise determining the level of one or more RNA transcripts expressed in blood obtained from one or more individuals having a disease and comparing the level of each of said one or more RNA transcripts with the level of each of said one or more RNA transcripts in blood obtained from one or more individuals not having the disease, wherein the RNA transcripts which display differing levels are identified as biomarkers. WO 2004/112589 further provides methods for diagnosing a condition in an individual comprising determining the level of the gene transcripts, which correspond to the biomarkers of the disease and kits comprising said biomarkers. WO 2004/112589 further discloses that when comparing between two populations of individuals having and not having a particular disease in order to identify biomarkers of a disease, such populations preferably share at least one phenotype in common. Examples of phenotypes that can be in common in such populations include similar age, sex and body mass index (BMI). There is no indication that the individuals belong to a closed or founder population.

[0007] U.S. Patent Application No. 2005/0042630 relates to methods of identifying markers for asthma. The methods for identifying markers for asthma according to U.S. Patent Application No. 2005/0042630 comprise determining the level of one or more gene transcripts in blood obtained from one or more individuals having asthma, wherein each of said one or more transcripts is expressed by a gene that is a candidate marker for asthma and comparing the level of each of said one or more gene transcripts with the level of each of said one or more genes transcripts in blood obtained from one or more individuals not having asthma, wherein those compared transcripts which display differing levels are identified as being markers for asthma. U.S. Patent Application No. 2005/0042630 further provides methods for diagnosing or prognosing asthma in an individual comprising determining the level of the gene transcripts, which correspond to asthma. U.S. Patent Application No. 2005/0042630 claims isolated nucleic acid molecules that correspond to two or more of the asthma markers, an array consisting essentially of said nucleic acid molecules and a kit for diagnosing or prognosing asthma. U.S. Patent Application No. 2005/0042630 makes use of whole blood samples, which includes all the types of blood cells. It is indicated explicitly in U.S. Patent Application No. 2005/0042630 that use of whole blood is of great advantage, as purifying blood cells is costly and time consuming.

[0008] Founder populations offer many advantages for mapping genetic traits, particularly complex traits that are likely to be genetically heterogeneous. It is well established that since founder populations are relatively genetically homogenous, the molecular genetic mechanism underlying genetically heterogeneous diseases is easier to dissect in founder populations than in mixed populations. Indeed, Ober, C., et al., have conducted a genome-wide screen in asthma patients of Hutterites, a religious isolate of European ancestry, and identified twelve markers that showed possible linkage to asthma (Ober, C., et al, Hum. Mol. Genet. 7: 1393-1398, 1998). Laitinen, T. et al., have carried out a genome-wide scan for susceptibility loci in asthma individuals of a founder population in Finland, and found evidence for linkage in chromosome 7p14-p15. Thus, although genotype analysis and linkage disequilibrium studies in founder populations were found to be instrumental in finding susceptible disease loci in each closed population, they failed in determining diagnostic tools in the general population. Complex polygenic diseases were found to be characterized by different mutated loci in different populations making the generalization of one loci-one disease impossible.

[0009] There is an unmet need for accurate and reliable methods of diagnosing a disease in a subject, which methods neither comprise detecting susceptibility loci for the disease nor comprise determining the level of gene transcripts, which correspond to candidate markers of the disease as identified in open populations.

### SUMMARY OF THE INVENTION

[0010] The present invention relates to methods of diagnosis, prognosis and monitoring of a disease in a subject comprising determining the level of gene expression in isolated blood cells obtained from the subject.

[0011] It is now disclosed that isolated and purified blood cells enable achieving accurate and reproducible gene expression profiles of a disease as compared to those obtained with whole blood samples. Though the isolation of specific blood cells constitutes an additional step in the process of obtaining a gene expression profile from a blood sample, the significant differences in the levels of gene transcripts obtained from isolated blood cell samples as compared to whole blood samples substantiates the necessity of this step in order to provide highly reproducible gene expression profiles for a particular disease.

[0012] It is further disclosed that the use of a closed or founder population, which a priori has a lower genetic variation than that of an open population, enables obtaining a precise and reproducible gene expression profile of a particular disease. Thus, the use of isolated blood cells of subjects that belong to a closed or founder population is highly advantageous as it provides a reliable and consistent gene expression profile for a particular disease.

[0013] It is further disclosed that a disease-specific profile of gene expression is useful in diagnosis, prognosis, and monitoring a disease in isolated blood cell samples of a subject.

[0014] According to the first aspect, the present invention provides a method of identifying at least one biomarker for a disease comprising the steps of: a) determining the level of at least one gene transcript in a subpopulation of blood cells obtained from at least one subject having the disease, the at least one subject having the disease being a member of a closed population; and b) comparing the level of the at least one gene transcript from step a) with the level of said at least one gene transcript in the subpopulation of blood cells obtained from at least one subject not having the disease, the at least one subject not having the disease being a member of the closed population, wherein a gene transcript which displays significantly differing levels in the comparison of step b) is identified as being a biomarker for said disease.

[0015] According to some embodiments, the method of identifying at least one biomarker for a disease further comprises the following steps: c) determining the level of said at least one gene transcript in said subpopulation of blood cells obtained from at least one subject having the disease, the at least one subject having the disease being a member of an open population; and d) comparing the level of the at least one gene transcript from step c) with the level of said at least one gene transcript in the subpopulation of blood cells obtained from at least one subject not having the disease, the at least one subject not having the disease being a member of an open population, wherein a gene transcript which displays corresponding changes in levels of expression in the comparisons of steps b) and d) is identified as being a biomarker for said disease.

[0016] According to additional embodiments, the corresponding changes in levels of expression in the comparisons of steps b) and d) are increasing levels. According to other embodiments, the corresponding changes in levels of expression in the comparisons of steps b) and d) are decreasing levels.

[0017] According to some embodiments, the at least one biomarker for a disease is a plurality of biomarkers. According to additional embodiments, the plurality of biomarkers comprises at least 5 biomarkers. According to further embodiments, the plurality of biomarkers comprises at least 10 biomarkers. According to further embodiments, the plurality of biomarkers comprises at least 100 biomarkers. According to further embodiments, the plurality of biomarkers comprises at least 200 biomarkers. According to further embodiments, the plurality of biomarkers comprises at least 500 biomarkers.

[0018] According to some embodiments, the closed or founder population is selected from the group consisting of Quebecois, Icelandic, Dutch, East Central Finnish, North American Hutterites, Sicilian, Israel Arabic, Bedouin, Charkese, Ashkenazi Jewish, Cochin Jewish populations, Ethiopian Jewish, Iraquian Jewish, Yemenite Jewish and Iranian Jewish.

[0019] According to some embodiments, the subpopulation of blood cells is peripheral white blood cells or leukocytes. According to additional embodiments, the subpopulation of blood cells is selected from the group consisting of monocytes, lymphocytes, neutrophils, eosinophils, and basophils.

[0020] According to additional embodiments, the disease for which biomarkers can be identified by the methods of the present invention is selected from the group consisting of cardiovascular disorders, immune disorders, autoimmune diseases, respiratory diseases, endocrine disorders, neurological disorders, muscular disorders, metabolic disorders, mood disorders, and cellular proliferative disorders.

[0021] According to an exemplary embodiment, the disease for which biomarkers can be identified is asthma. According to some embodiments, the biomarkers for asthma are selected from the group consisting of SEQ ID NOs:1-783 and complements thereof. According to additional embodiments, the biomarkers for asthma are selected from the group consisting of the sequences listed in Table 4 herein below and complements thereof. It is to be understood that the levels of gene transcripts corresponding to the biomarkers listed in Table 4 herein below were significantly different in subjects having asthma as compared to subjects not having asthma. Additionally, it is to be understood that gene transcripts identified according to the methods of the present invention as being biomarkers of a disease can be translated to polypeptides or proteins. Accordingly, the polypeptides or proteins can be identified as being biomarkers according to the principles of the present invention.

[0022] According to a further aspect, the present invention provides a plurality of isolated nucleic acid molecules corresponding to one or more of the biomarkers, identified by the methods of the present invention, or complements thereof.

[0023] According to another aspect, the present invention provides an array comprising a plurality of isolated nucleic acid molecules, wherein the isolated nucleic acid molecules corresponding to one or more of the biomarkers, identified by the methods of the present invention, or complements thereof.

[0024] According to another aspect, the present invention provides a method of diagnosing, monitoring or prognosing a disease in a subject comprising the steps of:
[0025] a) determining the level of at least one gene transcript in a subpopulation of blood cells obtained from the subject, wherein the at least one gene transcript corresponds to a biomarker, the biomarker having been determined by the steps of:
   [0026] i) determining the level of at least one gene transcript in a subpopulation of blood cells obtained from at least one subject having the disease, the at least one subject having the disease being a member of a closed population; and
   [0027] ii) comparing the level of the at least one gene transcript from step i) with the level of said at least one gene transcript in the subpopulation of blood cells obtained from at least one subject not having the disease, the at least one subject not having the disease being a member of the closed population, wherein a gene transcript which displays significantly differing levels in the comparison of step i) is identified as being a biomarker for said disease;
[0028] b) comparing the level of said at least one gene transcript of step a) with the level of said at least one gene transcript in a reference gene transcript profile, thereby determining the status of the disease in said subject.

[0029] According to some embodiments, the method of diagnosing, monitoring or prognosing a disease in a subject further comprising the steps of:
[0030] a) determining the level of at least one gene transcript in a subpopulation of blood cells obtained from the subject, wherein the at least one gene transcript corresponds to a biomarker, the biomarker having been determined by the steps of:
   [0031] i) determining the level of at least one gene transcript in a subpopulation of blood cells obtained from at least one subject having the disease, the at least one subject having the disease being a member of a closed population;
   [0032] ii) comparing the level of the at least one gene transcript from step i) with the level of said at least one gene transcript in the subpopulation of blood cells obtained from at least one subject not having the disease, the at least one subject not having the disease being a member of the closed population, wherein a gene transcript which displays significantly differing levels in the comparison of step i) is identified as being a biomarker for said disease;
   [0033] iii) determining the level of said at least one gene transcript in said subpopulation of blood cells obtained from at least one subject having the disease, the at least one subject having the disease being a member of an open population; and
   [0034] iv) comparing the level of the at least one gene transcript from step iii) with the level of said at least one gene transcript in the subpopulation of blood cells obtained from at least one subject not having the disease, the at least one subject not having the disease being a member of an open population, wherein a gene transcript which displays corresponding changes in levels of expression in the comparisons of steps ii) and iv) is identified as being a biomarker for said disease;
[0035] b) comparing the level of said at least one gene transcript of step a) with the level of said at least one gene transcript in a reference gene transcript profile, thereby determining the status of the disease in said subject.

[0036] According to some embodiments, the step of determining the level of the at least one gene transcript comprises determining the expression level of the gene. According to additional embodiments, the step of determining the level of the at least one gene transcript comprises determining the expression level of the polypeptide gene transcript.

[0037] According to some embodiments, the subpopulation of blood cells is peripheral white blood cells or leukocytes. According to other embodiments, the subpopulation of blood cells is selected from the group consisting of monocytes, lymphocytes, neutrophils, eosinophils, and basophils.

[0038] According to some embodiments, the biomarker for diagnosing, monitoring or prognosing the disease is a plurality of biomarkers.

[0039] According to additional embodiments, the disease that can be diagnosed, monitored or prognosed is selected from the group consisting of cardiovascular disorders, immune disorders, autoimmune diseases, respiratory diseases, endocrine disorders, neurological disorders, muscular disorders, metabolic disorders, mood disorders, and cellular proliferative disorders.

[0040] According to an exemplary embodiment, the disease is asthma. According to other embodiments, the biomarkers for asthma are selected from the group consisting of SEQ ID NOs:1-783 and complements thereof. According to some preferred embodiments, the biomarkers of asthma are selected from the group consisting of the sequences listed in Table 4 herein below and complements thereof.

[0041] According to some embodiments, the step of determining the level of at least one gene transcript comprises quantitative or semi-quantitative methods. According to some embodiments, the quantitative or semi-quantitative methods measure levels of nucleic acid. According to alternative embodiments, the quantitative or semi-quantitative methods measure levels of polypeptides. According to an exemplary embodiment, the step of determining the level of at least one gene transcript comprises microarray hybridization.

[0042] According to additional embodiments, the microarray hybridization comprises hybridizing a plurality of first isolated nucleic acid molecules to an array comprising a second plurality of isolated nucleic acid molecules. The first isolated nucleic acid molecules are selected from the group consisting of RNA, DNA, cDNA and PCR products. The second isolated nucleic acid molecules are selected from the group consisting of RNA, DNA, cDNA, PCR products, oligonucleotides and ESTs. According to one exemplary embodiment, the first isolated nucleic acid molecules are cDNAs and the second isolated nucleic acid molecules are ESTs or oligonucleotides, the cDNA and ESTs or oligonucleotides capable of hybridizing to each other. According to some embodiments, the second isolated nucleic acid molecules correspond to one or more biomarkers, identified by the methods of the present invention, or complements thereof.

These and other embodiments of the present invention will be better understood in relation to the figures, description, examples and claims that follow.

### BRIEF DESCRIPTION OF THE FIGURES

[0043] FIG. 1 shows a dendogram of all the genes of the asthma and non-asthma individuals in the Cochin population using human array A. The horizontal axis identifies individuals as asthmatic and non-asthmatic and the vertical axis represents the statistical variance between the samples (0.10 means 5%, 0.20 means 10%, etc.).

[0044] FIG. 2 shows a dendogram of all the genes of the asthma and non-asthma individuals in the Cochin population using human array B. The horizontal axis identifies individuals as asthmatic and non-asthmatic and the vertical axis represents the statistical variance between the samples (0.10 means 5%, 0.20 means 10%, etc.).

[0045] FIG. 3 shows a dendogram of all the genes comprising the “asthma primary gene expression profile” of the asthma and non-asthma individuals in the Cochin population using human array A. The horizontal axis identifies individuals as asthmatic and non-asthmatic and the vertical axis represents the statistical variance between the samples (0.10 means 5%, 0.20 means 10%, etc.).

[0046] FIG. 4 shows a dendogram of all the genes comprising the “asthma primary gene expression profile” of the asthma and non-asthma individuals in the Cochin population using human array B. The horizontal axis identifies individuals as asthmatic and non-asthmatic and the vertical axis represents the statistical variance between the samples (0.10 means 5%, 0.20 means 10%, etc.).

### DETAILED DESCRIPTION OF THE INVENTION

[0047] The present invention provides methods of identifying biomarkers, which correspond to one or more gene transcripts that are differentially expressed in peripheral blood cells of a subject having a disease or in a diseased subject undergoing a treatment. Also disclosed herein isolated nucleic acid molecules corresponding to said biomarkers as well as methods of diagnosing a disease using the biomarkers. Arrays comprising the biomarkers or complementary nucleic acid molecules thereof are disclosed.

[0048] According to the present invention, a blood sample is collected from one or more subjects, peripheral blood cells are purified, and RNA is isolated from the cells. According to some embodiments, the peripheral blood cells are peripheral white blood cells or leukocytes. As white blood cells or leukocytes include different cell types such as lymphocytes, monocytes, neutrophils, eosinophils and basophils, the present invention encompasses one or more of the blood cell subpopulations.

[0049] Biomarkers are identified by measuring the level of one or more gene transcripts or a synthetic nucleic acid copy (cDNA, cRNA, etc.) thereof from one or more subjects having a disease and comparing the level of the one or more gene transcripts to that of one or more subjects not having the disease and/or normal healthy subjects. In some embodiments, the level of one or more gene transcripts is determined by determining the level of an RNA species. In one embodiment, mass spectrometry can be used to quantify the level of one or more gene transcripts. In a preferred embodiment, the level of one or more gene transcripts is determined using microarray analysis. Other methods to quantify gene transcripts include, for example, quantitative RT-PCR and conventional molecular biology and recombinant DNA techniques aiming at quantitatively or semi-quantitatively measure one or more species of gene transcripts (see, for example, Sambrook, Fritsch and Maniatis, “Molecular Cloning: A Laboratory Manual (1982); “DNA Cloning: A Practical Approach,” Volumes I and II (D. N. Glover ed. 1985); B. Perbal, “A Practical Guide To Molecular Cloning” (1984)).

[0050] Other methods to quantify or semi-quantify a gene transcript include determining the level of polypeptides or proteins in a blood sample. Methods for measuring levels of a polypeptide or protein are well known in the art and include, but are not limited to, enzyme linked immunosorbent assay (ELISA), western blotting, protein or antibody based biosensors and mass spectrometry.

[0051] According to some embodiments of the invention, levels of one or more species of gene transcripts from a blood cell sample of at least one subject having a disease, wherein the subject being a member of a closed or founder population, are compared to levels of the one or more species of gene transcripts from a blood cell sample of a subject not having the disease, wherein the subject not having the disease being a member of said closed or founder population, so as to identify biomarkers, which are able to differentiate between the two populations. According to other embodiments, blood cell samples of at least two subjects from each of said populations are compared. According to additional embodiments, blood samples of at least 5 subjects from each of said populations are compared.

[0052] The identified biomarkers can be used for diagnosing, monitoring or prognosing a disease in a subject.

Definitions

[0053] A “cDNA” is defined as a complementary DNA and is a product of a reverse transcription reaction from an mRNA template. “RT-PCR” refers to reverse transcription polymerase chain reaction and results in production of cDNAs that are complementary to the mRNA template(s). RT-PCR includes quantitative real time RT-PCR, which uses a labeling means to determine the level of mRNA transcription.

[0054] The term “oligonucleotide” is defined as a molecule comprised of two or more deoxyribonucleotides and/or ribonucleotides, preferably more than three. Its exact size will depend upon many factors, which, in turn, depend upon the ultimate function and use of the oligonucleotide. The upper limit may be 15, 20, 25, 30, 40, 50, 60 or 70 nucleotides in length.

[0055] The term “primer” as used herein refers to an oligonucleotide, whether occurring naturally as in a purified restriction digest or produced synthetically, which is capable of acting as a point of initiation of synthesis when placed under conditions in which synthesis of a primer extension product, which is complementary to a nucleic acid strand, is induced, i.e., in the presence of nucleotides and an inducing agent such as a DNA polymerase and at a suitable temperature and pH. The primer may be either single-stranded or double-stranded and must be sufficiently long to prime the synthesis of the desired extension product in the presence of the inducing agent.

[0056] The term “subject” refers to human subjects and non-human subjects.

[0057] As used herein, “determining” refers to detecting the presence of or measuring the level or concentration of a gene expression product, for example cDNA or RNA by any method known to those of skill in the art or taught in numerous texts and laboratory manuals (see, for example, Ausubel et al. Short Protocols in Molecular Biology (1995) 3rd Ed. John Wiley & Sons, Inc.). For example, methods of detection include, but are not limited to, RNA fingerprinting, Northern blotting, polymerase chain reaction, ligase chain reaction, strand displacement amplification, transcription based amplification, and other methods as known in the art.

[0058] As used herein, a disease of the invention includes, but is not limited to, blood disorders, blood lipid diseases, autoimmune diseases, arthritis (including osteoarthritis, rheumatoid arthritis, lupus, allergies, juvenile rheumatoid arthritis and the like), bone or joint disorders, cardiovascular disorders (including heart failure, congenital heart disease; rheumatic fever, valvular heart disease; corpulmonale, cardiomyopathy, myocarditis, pericardial disease; vascular diseases such as atherosclerosis, acute myocardial infarction, ischemic heart disease and the like), obesity, respiratory diseases (including asthma, pneumonitis, pneumonia, pulmonary infections, lung disease, bronchiectasis, tuberculosis, cystic fibrosis, interstitial lung disease, chronic bronchitis emphysema, pulmonary hypertension, pulmonary thromboembolism, acute respiratory distress syndrome and the like), hyperlipidemias, endocrine disorders, immune disorders, infectious diseases, neurological disorders (including migraines, seizures, epilepsy, cerebrovascular diseases, Alzheimer's, dementia, Parkinson's, ataxic disorders, motor neuron diseases, cranial nerve disorders, spinal cord disorders, meningitis and the like) including neurodegenerative and/or neuropsychiatric diseases and mood disorders (including schizophrenia, anxiety, bipolar disorder; manic depression and the like), skin disorders, kidney diseases, scleroderma, strokes, hereditary hemorrhage telangiectasia, diabetes, disorders associated with diabetes (e.g., PVD), hypertension, Gaucher's disease, cystic fibrosis, sickle cell anemia, liver disease, pancreatic disease, eye, ear, nose and/or throat disease, diseases affecting the reproductive organs, gastrointestinal diseases (including diseases of the colon, diseases of the spleen, appendix, gall bladder, and others) and the like.

[0059] According to some embodiments of the invention, a disease refers to an immune disorder, such as those associated with over expression of a gene or expression of a mutant gene (e.g., autoimmune diseases, such as diabetes mellitus, arthritis (including rheumatoid arthritis, juvenile rheumatoid arthritis, osteoarthritis, psoriatic arthritis), multiple sclerosis, encephalomyelitis, myasthenia gravis, systemic lupus erythematosis, autoimmune thyroiditis, dermatitis (including atopic dermatitis and eczematous dermatitis), psoriasis, Sjogren's Syndrome, Crohn's disease, aphthous ulcer, iritis, conjunctivitis, keratoconjunctivitis, ulcerative colitis, asthma, allergic asthma, cutaneous lupus erythematosus, scieroderma, vaginitis, proctitis, drug eruptions, leprosy reversal reactions, erythema nodosum leprosum, autoimrnune uveitis, allergic encephalomyelitis, acute necrotizing hemorrhagic encephalopathy, idiopathic bilateral progressive sensorineural hearing, loss, aplastic anemia, pure red cell anemia, idiopathic thrombocytopenia, polychondritis, Wegener's granulomatosis, chronic active hepatitis, Stevens-Johnson syndrome, idiopathic sprue, lichen planus, Graves' disease, sarcoidosis, primary biliary cirrhosis, uveitis posterior, and interstitial lung fibrosis), graft-versus-host disease, cases of transplantation, and allergy.

[0060] According to additional embodiments, a disease of the invention is a cellular proliferative and/or differentiative disorder that includes, but is not limited to, cancer e.g., carcinoma, sarcoma or other metastatic disorders and the like. As used herein, the term “cancer” refers to cells having the capacity for autonomous growth, i.e., an abnormal state of condition characterized by rapidly proliferating cell growth. “Cancer” is meant to include all types of cancerous growths or oncogenic processes, metastatic tissues or malignantly transformed cells, tissues, or organs, irrespective of histopathologic type or stage of invasiveness. Examples of cancers include but are nor limited to solid tumors and leukemias, including: apudoma, choristoma, branchioma, malignant carcinoid syndrome, carcinoid heart disease, carcinoma (e.g., Walker, basal cell, basosquamous, Brown-Pearce, ductal, Ehrlich tumor, non-small cell lung, oat cell, papillary, bronchiolar, bronchogenic, squamous cell, and transitional cell), histiocytic disorders, leukemia (e.g., B cell, mixed cell, null cell, T cell, T-cell chronic, HTLV-II-associated, lymphocytic acute, lymphocytic chronic, mast cell, and myeloid), histiocytosis malignant, Hodgkin disease, immunoproliferative small, non-Hodgkin lymphoma, plasmacytoma, reticuloendotheliosis, melanoma, chondroblastoma, chondroma, chondrosarcoma, fibroma, fibrosarcoma, giant cell tumors, histiocytoma, lipoma, liposarcoma, mesothelioma, myxoma, myxosarcoma, osteoma, osteosarcoma, Ewing sarcoma, synovioma, adenofibroma, adenolymphoma, carcinosarcoma, chordoma, craniopharyngioma, dysgerminoma, hamartoma, mesenchymoma, mesonephroma, myosarcoma, ameloblastoma, cementoma, odontoma, teratoma, thymoma, trophoblastic tumor, adeno-carcinoma, adenoma, cholangioma, cholesteatoma, cylindroma, cystadenocarcinoma, cystadenoma, granulosa cell tumor, gynandroblastoma, hepatoma, hidradenoma, islet cell tumor, Leydig cell tumor, papilloma, Sertoli cell tumor, theca cell tumor, leiomyoma, leiomyosarcoma, myoblastoma, myosarcoma, rhabdomyoma, rhabdomyosarcoma, ependymoma, ganglioneuroma, glioma, medulloblastoma, meningioma, neurilemmoma, neuroblastoma, neuroepithelioma, neurofibroma, neuroma, paraganglioma, paraganglioma nonchromaffin, angiokeratoma, angiolymphoid hyperplasia with eosinophilia, angioma sclerosing, angiomatosis, glomangioma, hemangioendothelioma, hemangioma, hemangiopericytoma, hernangiosarcoma, lymphangioma, lymphangiomyoma, lymphangiosarcoma, pinealoma, carcinosarcoma, chondrosarcoma, cystosarcoma, phyllodes, fibrosarcoma, hemangiosarcoma, leimyosarcoma, leukosarcoma, liposarcoma, lymphangiosarcoma, myosarcoma, myxosarcoma, ovarian carcinoma, rhabdomyosarcoma, sarcoma (e.g., Ewing, experimental, Kaposi, and mast cell), neoplasms (e.g., bone, breast, digestive system, colorectal, liver, pancreatic, pituitary, testicular, orbital, head and neck, central nervous system, acoustic, pelvic respiratory tract, and urogenital), neurofibromatosis, and cervical dysplasia, and other conditions in which cells have become immortalized or transformed.

[0061] As defined herein, a “microarray” refers to a plurality of isolated nucleic acid molecules or polynucleotide probes attached to a support where each of the nucleic acid molecules or polynucleotide probes is attached to a support in unique pre-selected region. According to one embodiment, the nucleic acid molecule or polynucleotide probe attached to the support is DNA. In other embodiment, the nucleic acid or polynucleotide probe attached to the support is cDNA. The term “nucleic acid” is interchangeable with the term “polynucleotide”. The term “polynucleotide” refers to a chain of nucleotides. Preferably, the chain has from about 20 to 10,000 nucleotides, more preferably from about 150 to 3,500 nucleotides. The term “probe” refers to a polynucleotide sequence capable of hybridizing with a gene transcript or complement thereof to form a polynucleotide probe/gene transcript complex.

[0062] As used herein, a “closed” or “founder” population refers to a population of subjects characterized by a close genetic relationship. A closed population can be further characterized by elevated incidence of certain hereditary disorders and/or a higher prevalence of mutations than in an open or mixed population. Examples of closed or founder populations include, but are not limited to, populations of Quebec, Netherland, Iceland, East Central Finland (Kainuu province), Amish, Newfoundland, Israel Bedouins, Druze, Charkese, Hutterites of North America, Israeli Jewish subpopulation including, but not limited to, the Ethiopian, Iraqi, Yemenite, Ashkenazi, Iranian and Cochin Jewish subpopulations.

[0063] The term “gene” includes a region that can be transcribed into RNA, as the invention contemplates detection of RNA or equivalents thereof, for example, cDNA and cRNA. A gene of the invention includes, but is not limited to, genes specific for or involved in a particular biological process and/or indicative of a biological process, such as apoptosis, differentiation, stress response, aging, proliferation, etc.; cellular mechanism genes, e.g., cell-cycle, signal transduction, metabolism of toxic compounds, and the like; disease associated genes, e.g., genes involved in asthma, cancer, schizophrenia, diabetes, high blood pressure, atherosclerosis, infection and the like.

[0064] For example, the gene of the invention can be an oncogene, whose expression within a cell induces that cell to become converted from a normal cell into a tumor cell. Further examples of genes of the invention include, but are not limited to, cytokine genes, prion genes, genes encoding molecules that induce angiogenesis, genes encoding adhesion molecules, genes encoding cell surface receptors, genes encoding proteins that are involved in metastasizing and/or invasive processes, genes of proteases as well as of molecules that regulate apoptosis and the cell cycle.

[0065] As used herein, a “biomarker” is a molecule, which corresponds to a species of a gene transcript that has a quantitatively differential concentration or level in peripheral blood cells of a subject having a disease compared to a subject not having said disease. As such, a biomarker includes a synthetic nucleic acid including cRNA, cDNA and the like. A species of a gene transcript includes any gene transcript, which is transcribed from any part of the subject's chromosomal and extra-chromosomal genome. A species of a gene transcript can be an RNA. A species of a gene transcript can be an mRNA, a cDNA or a portion thereof. Thus, a biomarker according to the present invention is a molecule that corresponds to a species of a gene transcript, which is present at an increased level or a decreased level in peripheral blood cells of at least one subject having a disease, wherein the at least one subject being a member of a closed population, when compared to the level of said transcript in peripheral blood cells of at least one subject not having said disease, wherein the subject not having the disease being a member of said closed population.

[0066] According to the present invention, the level of a gene transcript can be determined by measuring the level of the gene transcript, e.g., RNA, using semi-quantitative methods such as microarray hybridization or more quantitative methods such as quantitative RT-PCR.

[0067] When determining whether a first level of a gene transcript in a sample of peripheral blood cells of a subject having a disease is different from a second level of the gene transcript in a sample of peripheral blood cells of a subject not having the disease, a ratio between the first and second levels of the gene transcripts has to be greater or lower than 1.0. For example, a ratio of greater than 1.2, 1.5, 2, 4, 10, or 20, or lower than 0.8, 0.6, 0.2 or 0.1 indicates differential expression of the gene.

[0068] A “plurality” refers to a group of at least one or more members, more preferably to a group of at least about 10 members, and more preferably to a group of at least about 20 members.

[0069] As defined herein, the profile of a plurality of gene transcripts, which reflect gene expression levels in a particular sample is defined as a “gene transcript profile”. Comparison between gene transcript profiles of different blood cell samples can be used to discern differences in transcriptional activities. Thus, a gene transcript profile obtained from peripheral blood cells can show differences occurring between normal and diseased subjects or between untreated and treated subjects.

[0070] A gene transcript profile of at least one subject having a disease, the subject being a member of a founder population, is defined as a “reference gene transcript profile”. The reference gene transcript profile reflects the level of a plurality of gene transcripts corresponding to biomarkers of said disease. Preferably, at least two subjects are used to obtain a reference gene transcript profile. More preferably, at least 10 subjects are used to obtain a reference gene transcript profile. Most preferably, at least 25 subjects are used to obtain a reference gene transcript profile. Accordingly, a mean of the level of each one of the gene transcripts can be determined and used as the reference gene transcript profile. Alternatively and/or additionally, a range of the levels of each one of the gene transcripts corresponding to a biomarker can be determined and used as the reference gene transcript profile. It is to be understood that the reference gene transcript profile is obtained under conditions where internal and external controls are included (herein below). Additionally or alternatively, the reference gene transcript profile can be a gene transcript profile of at least one subject not having a disease, the subject not having the disease being a member of a closed population.

[0071] According to other embodiments, a gene is differentially expressed if the ratio of the mean or median level of a gene transcript in a first population as compared with the mean or median level of the gene transcript of the second population is greater or lower than 1.0.

Construction of a Microarray

[0072] A nucleic acid microarray (oligonucleotides, RNA, DNA, cDNA, PCR products or expression sequence tags) can be constructed by any method known in the art (see, for example, US Patent Application No. 2005/0042630; U.S. Pat. No. 6,607,879 which are incorporated by reference as if fully set forth herein). A nucleic acid microarray can be constructed as follows:

[0073] Nucleic acids (RNA, DNA, cDNA, PCR products or ESTs) (about 40 μl) are precipitated with 4 μl of 3M sodium acetate (pH 5.2) and 100 μl (2.5 volumes) of ethanol and stored overnight at −20° C. They are then centrifuged at 3,300 rpm at 4° C. for 1 hour. The obtained pellets are washed with 50 μl ice-cold 70% ethanol and centrifuged again for 30 minutes. The pellets are then air-dried and resuspended well in 50% dimethylsulfoxide (DMSO) or 20 μl 3×SSC overnight. The samples are then deposited either singly or in duplicate onto Gamma Amino Propyl Silane (Corning CMT-GAPS or CMT-GAP2, Catalog No. 40003, 40004) or polylysine-coated slides (Sigma Cat. No. P0425) using a robotic GMS 417 or 427 arrayer (Affymetrix, California). The boundaries of the DNA spots on the microarray are marked with a diamond scriber. The invention provides for arrays where 10-20,000 different DNAs are spotted onto a solid support to prepare an array, and also can include duplicate, triplicate or multiple DNAs.

[0074] The arrays are rehydrated by suspending the slides over a dish of warm particle free ddH₂O for approximately one minute and snap-dried on a 70-80° C. inverted heating block for 3 seconds. DNA is then UV cross-linked to the slide (Stratagene, Stratalinker) or baked at 80° C. for two to four hours. The arrays are placed in a slide rack. An empty slide chamber is prepared and filled with the following solution: 3.0 grams of succinic anhydride (Aldrich) is dissolved in 189 ml of 1-methyl-2-pyrrolidinone; immediately after the last flake of succinic anhydride dissolved, 21.0 ml of 0.2 M sodium borate is mixed in and the solution is poured into the slide chamber. The slide rack is plunged rapidly and evenly in the slide chamber and vigorously shaken up and down for a few seconds, making sure the slides never leave the solution, and then mixed on an orbital shaker for 15-20 minutes. The slide rack is then gently plunged in 95° C. ddH₂O for 2 minutes, followed by plunging five times in 95% ethanol. The slides are then air dried by allowing excess ethanol to drip onto paper towels. The arrays are then stored in the slide box at room temperature until use. Other methods for construction of microarrays as known in the art can be used.

Nucleic Acid Microarrays

[0075] Any combination of the nucleic acid sequences generated from polynucleotides complementary to regions of DNA expressed in blood are used for the construction of a microarray. A microarray according to the invention preferably comprises between 10, 100, 500, 1000, 5000, 10,000, 15,000 and 20,000 nucleic acid members. The nucleic acid members are known or novel nucleic acid sequences or any combination thereof. A microarray according to the invention is used to assay for differential gene expression profiles of genes in blood cell samples from healthy patients as compared to patients with a disease.

[0076] There are two types of controls used on microarrays. First, positive controls are genes whose expression level is invariant in disease or healthy subjects and are used to monitor target DNA binding to the slide, quality of the spotting and binding processes of the target DNA onto the slide, quality of the RNA samples, and efficiency of the reverse transcription and fluorescent labeling of the samples. Second, negative controls are external controls derived from an organism unrelated to and therefore unlikely to cross-hybridize with the sample of interest. These are used to monitor for variation in background fluorescence on the slide, and non-specific hybridization.

Preparation of Fluorescent DNA Probe from mRNA

[0077] Methods for target nucleic acid preparation are well known in the art. The cDNA can be prepared as follows:

[0078] 2 μg Oligo-dT primers are annealed to 2 μg of mRNA isolated from a blood sample of a patient in a total volume of 15 μg, by heating to 70° C. for 10 min, and cooled on ice. The mRNA is reverse transcribed by incubating the sample at 42° C. for 1.5-2 hours in a 100 μl volume containing a final concentration of 50 mM Tris-HCl (pH 8.3), 75 mM KCl, 3 mM MgCl₂, 25 mM DTT, 25 mM unlabelled dNTPs, 400 units of Superscript II (200 U/μL, Gibco BRL), and 15 mM of Cy3 or Cy5 (Amersham). RNA is then degraded by addition of 15 μl of 0.1N NaOH, and incubation at 70° C. for 10 min. The reaction mixture is neutralized by addition of 15 μl of 0.1N HCl, and the volume is brought to 500 μl with TE (10 mM Tris, 1 mM EDTA), and 20 μg of Cot1 human DNA (Gibco-BRL) is added.

[0079] The labeled target nucleic acid sample is purified by centrifugation in a Centricon-30 micro-concentrator (Amicon). If two different target nucleic acid samples (e.g., two samples derived from a healthy patient vs. patient with a disease) are being analyzed and compared by hybridization to the same array, each target nucleic acid sample is labeled with a different fluorescent label (e.g., Cy3 and Cy5) and separately concentrated. For final target nucleic acid preparation 2.1 μl 20×SSC (1.5M NaCl, 150 mM NaCitrate (pH8.0)) and 0.35 μl 10% SDS is added. Other methods for probing as known in the art can be used. For example, chemiluminiscence can be used (e.g., chips of Metrigenix Ltd., gold chips, biosensors and the like.

Hybridization

[0080] Labeled nucleic acid is denatured by heating for 2 min at 100° C., and incubated at 37° C. for 20-30 min before being placed on a nucleic acid array under a 22 mm×22 mm glass cover slip. Hybridization is carried out at 65° C. for 14 to 18 hours in a custom slide chamber with humidity maintained by a small reservoir of 3×SSC. The array is washed by submersion and agitation for 2-5 min in 2×SSC with 0.1% SDS, followed by 1×SSC, and 0.1×SSC. Finally, the array is dried by centrifugation for 2 min in a slide rack in a Beckman GS-6 tabletop centrifuge in Microplus carriers at 650 rpm for 2 min. Other methods for hybridization as known in the art can be used.

Signal Detection and Data Generation

[0081] Following hybridization of an array with one or more labeled target nucleic acid samples, arrays are scanned using ScanArray Express H scanner (Perkin Elmer) and the data is acquired using the GenePix software connected to the scanner. Alternatively, other scanners and other softwares may be used.

[0082] If one target nucleic acid sample is analyzed, the sample is labeled with one fluorescent dye (e.g., Cy3 or Cy5).

[0083] After hybridization to a microarray as described herein, fluorescence intensities at the associated nucleic acid members on the microarray are determined from images taken with a scanner equipped with laser excitation sources and interference filters appropriate for the Cy3 or Cy5 fluorescence and with an appropriate program.

[0084] The presence of Cy3 or Cy5 fluorescent dye on the microarray indicates hybridization of a target nucleic acid and a specific nucleic acid member on the microarray. The intensity of Cy3 or Cy5 fluorescence represents the amount of target nucleic acid, which is hybridized to the nucleic acid member on the microarray, and is indicative of the expression level of the specific gene in the target sample.

[0085] If a nucleic acid member on the array shows a single color, it indicates that a gene corresponding to said nucleic acid member is expressed only in that blood cell sample. The appearance of both colors indicates that the gene is expressed in both blood cell samples, e.g., blood cell sample obtained from a subject having a disease and blood cell sample obtained from a subject not having the disease. The ratios of Cy3 and Cy5 fluorescence intensities, after normalization, are indicative of differences of expression levels of the associated nucleic acid members in the two samples for comparison. A ratio of expression not equal to 1.0 is used as an indication of differential gene expression.

[0086] Identification of genes differentially expressed in blood cell samples from patients with disease as compared to healthy patients or as compared to patients without said disease is determined by statistical analysis of the gene expression profiles from healthy patients or patients without disease compared to patients with disease using the “R” language, the “Bioconductor” software project for analysis and comprehension of genomic data (see, for example, Gentleman, R. C. et al., Genome Biol. 5(10):R80, 2004. Epub 2004 Sep. 15; and the Wilcox Mann Whitney rank sum test). Other statistical tests can also be used (see, for example, Sokal and Rohlf (1987) Introduction to Biostatistics 2nd edition, WH Freeman, New York, which is incorporated herein in their entirety).

[0087] In order to facilitate ready access, e.g. for comparison, review, recovery and/or modification, the expression profiles of patients with disease and/or patients without disease or healthy patients can be recorded in a database.

[0088] As would be understood by a person skilled in the art, comparison as between the expression profile of a test patient with expression profiles of patients with a disease, expression profiles of patients with a certain stage or degree of progression of said disease, without said disease, or healthy individuals so as to diagnose or prognose said test patient can occur via expression profiles generated concurrently or non concurrently. It would be understood that expression profiles can be stored in a database to allow said comparison.

Use of Expression Profiles for Diagnostic Purposes

[0089] As would be understood to a person skilled in the art, one can utilize sets of genes, which have been identified as differentially expressed in a disease as described above in order to characterize an unknown sample as having said disease or not having said disease.

[0090] The diagnosing or prognosing may thus be performed by comparing the expression level of one or more genes, three or more genes, five or more genes, ten or more genes, twenty or more genes, fifty or more genes, one hundred or more genes, two hundred or more genes, or all of the genes disclosed for the specific disease in question.

Data Acquisition and Analysis of Differentially Expressed EST Sequences

[0091] The differentially expressed EST sequences are then searched against available databases, including the “Reference Sequence” (RefSeq) collection and the “UniGene” system for automatically partitioning “GenBank” sequences into a non-redundant set of gene-oriented clusters, “nt”, “nr”, “est”, “gss” and “htg” databases available through NCBI to determine putative identities for ESTs matching to known genes or other ESTs. Functional characterization of ESTs with known gene matches is made according to any known method. For example, differentially expressed EST sequences are compared to the non-redundant Genbank/EMBL/DDBJ and dbEST databases using the BLAST algorithm (Altschul S. F., et al., J. Mol. Biol. 215: 403-410, 1990).

[0092] Genes are identified from ESTs according to known methods. To identify novel genes from an EST sequence, the EST should preferably be at least 100 nucleotides in length, and more preferably 150 nucleotides in length, for annotation. Preferably, the EST exhibits open reading -frame characteristics (i.e., can encode a putative polypeptide).

[0093] Because of the completion of the Human Genome Project, a specific EST, which matches with a genomic sequence can be mapped onto a specific chromosome based on the chromosomal location of the genomic sequence. However, no function may be known for the protein encoded by the sequence and the EST would then be considered “novel” in a functional sense. In one aspect, the invention is used to identify a novel differentially expressed EST, which is part of a larger known sequence for which no function is known. Alternatively, or additionally, the EST can be used to identify an mRNA or polypeptide encoded by the larger sequence as a diagnostic or prognostic biomarker of a disease.

[0094] Identified genes can be catalogued according to their putative function. Functional characterization of ESTs with known gene matches is preferably made according to the categories described by Hwang et al. (Circulation 96: 4146-4203, 1997).

Known Nucleic Acid Sequences or ESTs and Novel Nucleic Acid Sequences or ESTs

[0095] An EST that exhibits a significant match (>90% identity in at least 200 bp long) to at least one existing sequence in an existing nucleic acid sequence database is characterized as a “known” sequence according to the invention. Within this category, some known ESTs match to existing sequences, which encode polypeptides with known function(s) and are referred to as a “known sequence with a function”. Other “known” ESTs exhibit a significant match to existing sequences, which encode polypeptides of unknown function(s) and are referred to as a “known sequence with no known function”.

[0096] EST sequences, which have no significant match (less than 65% identity) to any existing sequence in the above cited available databases are categorized as novel ESTs. To identify a novel gene from an EST sequence, the EST is preferably at least 150 nucleotides in length. More preferably, the EST encodes at least part of an open reading frame, that is, a nucleic acid sequence between a translation initiation codon and a termination codon, which is potentially translated into a polypeptide sequence.

[0097] The following examples are presented in order to more fully illustrate certain embodiments of the invention. They should in no way, however, be construed as limiting the broad scope of the invention. One skilled in the art can readily devise many variations and modifications of the principles disclosed herein without departing from the scope of the invention.

### EXAMPLE 1

### Determination of Gene Expression Levels in White Blood Cells

Selecting Healthy Subjects and Subjects Having Asthma

[0098] The Cochin Jews are a closed population that lived isolated for many generations in Cochin, a small city within the Malabar region in India. The intermarriages with the local population as well as with other Indian Jews were scarce and most of the marriages were arranged within the community. The Cochin Jews immigrated to Israel in the late 1950's and settled in two main geographical areas, in some villages close to Jerusalem and in the Negev Desert.

[0099] Subjects were diagnosed as having asthma phenotypes by performing the following tests: allergy skin tests, blood tests for IgE and eosinophils levels, pulmonary function tests, response to asthma drugs such as ventoline and methacholine challenge test according to the American Thoracic Society Standards (Amer. J. Respir. Crit. Care Med. 152: 1107-1136, 1995).

[0100] The Cochin population has been shown to have higher incidence of asthma and allergy (see Table 1) as compared to the incidence of these conditions in the non-Cochin population.

TABLE 1
Prevalence of asthma and allergy in the Cochin and
non-Cochin populations.

| | Total | Cochins- | Cochins- | Non-Cochins- |
|---|---|---|---|---|
| | Cochins | desert | Jerusalem | Jerusalem |
| N | 834 | 353 | 481 | 149 |
| Mean age, | 32.7 ± 20.9 | | | |
| years | | | | |
| Asthma total | 198 (23.7%) | 66 (18.7%) | 132 (27.4%) | 13 (8.7%) |
| Allergic | 117 (14%) | 27 (7.6%) | 90 (18.7%) | 7 (4.7%) |
| asthma | | | | |
| Non-allergic | 81 (9.7%) | 39 (11.0%) | 42 (8.7%) | 6 (4%) |
| asthma | | | | |
| Allergy total | 246 (29.5%) | 80 (22.7%) | 166 (34.5%) | 10 (7%) |
| Allergy with | 129 (15.5%) | 53 (15%) | 76 (15.8%) | 3 (2%) |
| no asthma | | | | |
| Allergy and/ | 327 (39.2%) | 119 (33.7%) | 208 (43.2%) | 16 (10.7%) |
| or asthma | | | | |

[0101] As shown in Table 1, among the Cochin Jewish population, the prevalence of asthma was 23.7% and of allergy 29.5%. The prevalence of asthma and allergy in the non-Cochin population was 8.7% and 7%, respectively. There was no difference in the prevalence of asthma between males (25.3%) and females (22.2%). In addition, the prevalence of allergic asthma was significantly higher than non-allergic asthma (14% vs. 9.7%; p>0.001). In contrast, in the non-Cochin population, the prevalence of allergic asthma and non-allergic asthma was very similar (4.7% vs. 4%).

[0102] The following groups were used for the experiment:
[0103] 2. Cochin subjects (both parents are Cochins) having from asthma—19 subjects;
[0104] 3. Cochin subjects (both parents are Cochins) with no evidence of asthma—19 subjects;
[0105] 4. Non-Cochin Jews having asthma—20 subjects; and
[0106] 5. Non-Cochin Jews with no evidence of asthma—25 subjects.

[0107] Most of the subjects of the Cochin population were chosen in a way that healthy and asthma subjects were originate from the same family (e.g., parents, children and siblings) in order to further decrease the variations between individuals and hence to increase the statistical significance of the study.

Leukocyte Purification

[0108] Venous blood (50 ml) was collected from each individual into tubes (Benkton Dickenson Vacutainer), which contained K-EDTA as an anticoagulant, and placed immediately on ice. Two ml of blood were removed and used for differential cell counting and IgE determination.

[0109] Leukocyte purification was performed within 5 minutes after blood withdrawal as follows:

[0110] 15 ml Ficoll-400 (Amersham) were placed in 50 ml plastic tubes (Nunc; 4 tubes per volunteer). Fifty ml of the freshly collected blood (5 min after drawing) were diluted with phosphate buffered saline (without Ca++ and Mg++; Sigma) to a final volume of 100 ml and carefully placed over the Ficoll column. The columns were centrifuged in a cooled eppendorff centrifuge (model 5810, rotor A-4-81) for 20 min at 1000×g. Immediately thereafter, four ml of serum of each sample were separated and frozen in liquid nitrogen.

[0111] The buffy coat containing the leukocytes was separated by centrifugation at 100×g in a cooled eppendorff centrifuge (model 5810, rotor A-4-81) and washed once with 2 ml phosphate buffered saline (without Ca++ and Mg++; Sigma). The purified leukocytes (between 6 to 12 ml) were placed in 4 ml cryotubes (Nunc) containing 2 ml of ice cold Trizol (Invitrogen), vortexed and frozen in liquid nitrogen. The leukocytes were kept frozen until RNA purification.

RNA Purification

[0112] Total RNA of leukocytes was purified using Trizol (Invitrogene) and Phase Lock Gel (Invitrogen) according to the manufacturer's procedure. This method achieved high yield of RNA. Briefly, the leukocytes were thawed at room temperature. The ratio of cell/trizol was 5×10⁶ cells, 1 ml of Trizol.

[0113] Phase lock gel was added to the cell lisate (0.2 ml of phase lock gel per 1 ml of Trizol) and incubated for 15 min at room temperature. The tubes were centrifuged at 3250×g in a cooled eppendorff centrifuge (model 5810, rotor A-4-81) for 15 min at 4° C. The pure aqueous phase was transferred to a new tube and 0.5 ml of isopropyl alcohol were added per 1 ml of Trizol. The samples were mixed by vortexing, incubated for 15 min at room temperature, and centrifuged at 3250×g in a cooled eppendorff centrifuge (model 5810, rotor A-4-81) for 45 min at 4° C. to precipitate the RNA. The supernatant was discarded and the pellet was washed with 30 ml of ice cold 75% ethanol/water. The suspension was centrifuged for 15 min at 3250×g in a cooled eppendorff centrifuge (model 5810, rotor A4-81) at 4° C., the ethanol was decanted and the pellet was resuspended again in ice cold 75% ethanol/water and centrifuged for additional 5 min. The residual ethanol was removed and the RNA was immediately resuspended in 800 μl of nuclease free water and transferred to a 1.5 ml eppendorff tube.

[0114] For RNA purification, 400 μl of 7.5 M lithium chloride were added to each tube, mixed and incubated at −20° C. overnight.

Purification of RNA bv LiCl Precipitation

[0115] The samples were thawed, centrifuged at 15000 rpm for 15 min at 4° C. (eppendorff microcentrifuge), and the liquid was removed. The samples were washed twice with 1 ml 75% ethanol and ethanol traces were removed. The RNA was resuspended in 250 μl of nuclease free water and its concentration was brought to 5.5 mg/ml either by further dilution or by sodium acetate precipitation (see Bowtell, D. and Sambrook, J. Eds. Cold Spring Harbor Laboratory Press)

[0116] All samples had a 260/280 ratio of at least 1.8 and appear non-degraded when electropboresed on 1% agarose gel. The samples (9 μl aliquots) were kept at −80° C. until use.

RNA Amplification

[0117] Five μg of RNA from each of the samples were amplified using the Message-AmpII kit (Ambion, USA).

Fluorescence Labeling of the Samples for Microarray

[0118] All samples were fluorescently labeled using the fluorescent dyes Cy3 and Cy5 as follows: 50 μg of each RNA sample were combined with 1 μl of random primers (Invitrogene USA) in a total volume of 10 μl and incubated at 70° C. for 10 minutes for annealing, after which centrifugation was performed.

[0119] Two separate reaction mixtures were prepared for each sample. Each reaction was performed according with Superscriptll kit instructions. Briefly, a mixture containing 4 μl of 10× reaction buffer (Invitrogene, USA), 2 μl of 0.1M DTT (Invitrogene, USA), 2 μl of 10× low cytosine dNTP (Invitrogene, USA), 2 μl of Cy3 or Cy5 dCTP (Perkin Elmer, USA), 0.5 μl RNAse inhibitor (Invitrogene, USA), and 1 μl SuperScriptII reverse transcriptase (Invitrogene, USA). Each reaction mixture was added to an RNA sample+random primers (Invitrogene, USA), mixed and placed in a 42° C. water bath for 45 minutes followed by a brief centrifugation to collect condensation in the tubes. To each tube an additional 1 μl of SuperScriptII reverse transcriptase (Invitrogene USA) was added and the samples were further incubated at 42° C. for 45 minutes. Thereafter, the tubes were placed at 95° C. for two minutes and then place on ice.

cDNA Purification

[0120] The RNA was degraded using RNAse I (Promega, USA) and the cDNA was purified using QlAquick PCR purification kit (Quiagen) according to the manufacturer's procedure. The purified cDNA samples were concentrated on Microcon YM50 columns (Millipore) by centrifuging the samples applied to the columns for 2 min at 12400 rpm (eppendorff microfuge) at room temperature, inverting the columns, and then centrifuging again at 3000×g in an eppendorff microfuge to collect the cDNA. The volume of each sample was brought to 15 μl.

Hybridization to Microarrays

[0121] A library of about 41500 cDNA clones derived from the I.M.A.G.E consortium was purchased from Research Genetics (40K Human set, Research Genomics, USA) by the Van Andel Research Institute and sequence verified by Research Genomics (USA). The library was printed in two microarray slides denominated Human Array A and Human Array B. The two arrays together comprised the whole transcriptosome. Each of the cDNA fragments printed in the array were in average 1000 bp (ranging from 500 to 2500 bp). The library was printed using a custom built instrument built by Beta Integrated Concepts, Byron Center, MI, according with the provider's manual using Point Technologies (USA) PT-3000 split pins.

[0122] Each sample was hybridized to both Human Array A and Human Array B. To each array two different targets were hybridized, the sample in study and a common control sample labeled with either Cy3 or Cy5 dye.

[0123] The common control sample was created by the amplification of the same library used to print the array (40K Human set, Research Genomics, USA) and was labeled as described for the experimental samples. The use of a common control allows for the use of one control system for all the arrays in the study.

[0124] The microarray hybridization was performed according to well-known procedures (see, for example, Bowtell, D. and Sambrook, J. Eds. Cold Spring Harbor Laboratory Press.)

Data Acquisition and Analysis

[0125] The arrays were scanned in an Agilent Microarray Scanner, model G2565BA (Agilent, USA, within 5-6 hours after hybridization, the data acquisition, and Image analysis was performed in GenePix version 5.1.0.1 software connected to the scanner.

[0126] Following acquisition, quality control and statistical analysis of microarray data were done using the “R” language and environment version 2.01 (Ihaka R and Gentleman R, J. Comput. Graph. Stat. 5(3): 299-314, 1996) and the “Bioconductor” software project for the analysis and comprehension of genomic data (Gentleman, R. C. et al., Genome Biol. 5(10): R80, 2004. Epub 2004 Sep. 15). The analysis protocol consisted of clustering all the genes regulated in arrays A and B in the closed population as shown in FIGS. 1 and 2. It is clearly seen in these figures that the majority of the genes are similar and thus there is no clear separation between asthma and non-asthma individuals. The second step was extracting or eliminating the genes that are common to the afflicted and non afflicted individuals in the closed population, followed by clustering of the remaining genes in the arrays as shown in FIGS. 3 and 4. Following the extraction of the common genes it is clearly seen that the separation between asthma and non-asthma is clear. The statistic significance of each gene transcript between asthma and non-asthma individuals was calculated and expressed as P values for each gene in Tables 2, 3 and 4. Statistically significant genes were those that showed P values of 0.05 and below.

[0127] The gene transcripts, which were specifically regulated in the Cochin closed population suffering from asthma and which were not regulated in the asthma-free Cochin population, were defined as “asthma primary gene expression profile”.

[0128] The asthma primary gene expression profile was then compared to the gene expression profile of asthma individuals in the open population and only gene transcripts that were regulated in the closed population and open population were selected and were defined as “final asthma gene expression profile”.

[0129] Table 2 lists the genes that were identified as biomarkers for asthma.

TABLE 2
List of known mRNAs differentially expressed in asthma subjects

| SEQ ID NO | Regulation | Accession on Chip | Refseq_gi | Refseq_Accession | Refseq_Description |
|---|---|---|---|---|---|
| 1 | UP | R43320 | 10567815 | NM_020988 | Homo sapiens guanine nucleotide binding protein (G protein), alpha activating activity |
| | | | | | polypeptide O (GNAO1), transcript variant 1, mRNA |
| 2 | DOWN | AA035450 | 10835022 | NM_002222 | Homo sapiens inositol 1,4,5-triphosphate receptor, type 1 (ITPR1), mRNA |
| 3 | UP | AA702335 | 10864012 | NM_021200.1 | Homo sapiens pleckstrin homology domain containing, family B (evectins) member 1 |
| | | | | | (PLEKHB1), mRNA |
| 4 | UP | AA398356 | 11034818 | NM_020645 | Homo sapiens nuclear receptor interacting protein 3 (NRIP3), mRNA |
| 5 | DOWN | AA464417 | 11995467 | NM_021034.1 | Homo sapiens interferon induced transmembrane protein 3 (1-8 U) (IFITM3), mRNA |
| 6 | DOWN | AI187357 | 12232456 | NM_022774.1 | Homo sapiens hypothetical protein FLJ21144 (FLJ21144), mRNA |
| 7 | DOWN | AA922832 | 12545399 | NM_002162.2 | Homo sapiens intercellular adhesion molecule 3 (ICAM3), mRNA |
| 8 | UP | AA447588 | 13514808 | NM_004660 | Homo sapiens DEAD (Asp-Glu-Ala-Asp) box polypeptide 3, Y-linked (DDX3Y), mRNA |
| 9 | DOWN | AA703557 | 13540489 | NM_021813.1 | Homo sapiens BTB and CNC homology 1, basic leucine zipper transcription factor 2 (BACH2), |
| | | | | | mRNA |
| 10 | DOWN | AA262351 | 13775237 | NM_031310 | Homo sapiens plasmalemma vesicle associated protein (PLVAP), mRNA |
| 11 | DOWN | AA989257 | 13994241 | NM_031892.1 | Homo sapiens SH3-domain kinase binding protein 1 (SH3KBP1), mRNA |
| 12 | UP | AA629117 | 14042973 | NM_032041.1 | Homo sapiens neurocalcin delta (NCALD), mRNA |
| 13 | DOWN | H15274 | 14149689 | NM_015453 | Homo sapiens THUMP domain containing 3 (THUMPD3), mRNA |
| 14 | UP | AA459402 | 14211539 | NM_020963 | Homo sapiens Mov10, Moloney leukemia virus 10, homolog (mouse) (MOV10), mRNA |
| 15 | DOWN | AA426092 | 14249371 | NM_032744 | Homo sapiens chromosome 6 open reading frame 105 (C6orf105), mRNA |
| 16 | UP | H89490 | 14249505 | NM_032814 | Homo sapiens hypothetical protein FLJ14627 (FLJ14627), mRNA |
| 17 | UP | AI017101 | 14790189 | NM_015001.2 | Homo sapiens spen homolog, transcriptional regulator (Drosophila) (SPEN), mRNA |
| 18 | DOWN | R56211 | 15451788 | NM_002609 | Homo sapiens platelet-derived growth factor receptor, beta polypeptide (PDGFRB), mRNA |
| 19 | DOWN | AA453578 | 15529971 | NM_033412 | Homo sapiens mitochondrial carrier triple repeat 1 (MCART1), mRNA |
| 20 | UP | AA458932 | 15529981 | NM_033416 | Homo sapiens IMP4, U3 small nucleolar ribonucleoprotein, homolog (yeast) (IMP4), mRNA |
| 21 | UP | AA278384 | 16306490 | NM_001786.2 | Homo sapiens cell division cycle 2, G1 to S and G2 to M (CDC2), transcript variant 1, mRNA |
| 22 | DOWN | AA677076 | 16579891 | NM_052834 | Homo sapiens WD repeat domain 7 (WDR7), transcript variant 2, mRNA |
| 23 | DOWN | AA625981 | 17149837 | NM_000801 | Homo sapiens FK506 binding protein 1A, 12 kDa (FKBP1A), transcript variant 12B, mRNA |
| 24 | UP | AA453616 | 17572806 | NM_031916 | Homo sapiens ropporin 1-like (ROPN1L), mRNA |
| 25 | DOWN | AA620890 | 17864091 | NM_018897 | Homo sapiens dynein, axonemal, heavy polypeptide 7 (DNAH7), mRNA |
| 26 | UP | AA450001 | 17921983 | NM_004375.2 | Homo sapiens COX11 homolog, cytochrome c oxidase assembly protein (yeast) (COX11), |
| | | | | | mitochondrial protein, mRNA |
| 27 | DOWN | AI369867 | 17986269 | NM_016574.2 | Homo sapiens dopamine receptor D2 (DRD2), transcript variant 2, mRNA |
| 28 | DOWN | AA884902 | 17999529 | NM_005205.2 | Homo sapiens cytochrome c oxidase subunit VIa polypeptide 2 (COX6A2), nuclear gene nuclear gene encoding |
| | | | | | encoding mitochondrial protein, mRNA |
| 29 | UP | AI001846 | 18378734 | NM_014810.2 | Homo sapiens centrosome-associated protein 350 (CAP350), mRNA |
| 30 | DOWN | H09076 | 18491007 | NM_000775 | Homo sapiens cytochrome P450, family 2, subfamily J, polypeptide 2 (CYP2J2), mRNA |
| 31 | DOWN | AA430052 | 18497285 | NM_020865 | Homo sapiens DEAH (Asp-Glu-Ala-His) box polypeptide 36 (DHX36), mRNA |
| 32 | DOWN | AA490612 | 18553076 | XM_087200.1 | PREDICTED: Homo sapiens hypothetical LOC151443 (LOC151443), mRNA |
| 33 | DOWN | AA663884 | 18765734 | NM_130811 | Homo sapiens synaptosomal-associated protein, 25 kDa (SNAP25), transcript variant 2, mRNA |
| 34 | UP | AA131162 | 19718758 | NM_133337.1 | Homo sapiens fer-1-like 3, myoferlin (C. elegans) (FER1L3), transcript variant 2, mRNA |
| 35 | DOWN | N27023 | 19747268 | NM_130776 | Homo sapiens X antigen family, member 3 (XAGE3), transcript variant 2, mRNA |
| 36 | UP | AA449234 | 19913395 | NM_134269 | Homo sapiens smoothelin (SMTN), transcript variant 2, mRNA |
| 37 | DOWN | AA460719 | 19923448 | NM_016025 | Homo sapiens DORA reverse strand protein 1 (DREV1), mRNA |
| 38 | DOWN | AA122022 | 19923496 | NM_019063 | Homo sapiens echinoderm microtubule associated protein like 4 (EML4), mRNA |
| 39 | UP | N51752 | 19923854 | NM_032796 | Homo sapiens synapse associated protein 1, SAP47 homolog (Drosophila) (SYAP1), mRNA |
| 40 | UP | AA428196 | 20127494 | NM_006237 | Homo sapiens POU domain, class 4, transcription factor 1 (POU4F1), mRNA |
| 41 | UP | AA424948 | 20336296 | NM_022779 | Homo sapiens DEAD (Asp-Glu-Ala-Asp) box polypeptide 31 (DDX31), transcript variant 1, |
| | | | | | mRNA |
| 42 | UP | AA291513 | 20336472 | NM_001707 | Homo sapiens B-cell CLL/lymphoma 7B (BCL7B), transcript variant 1, mRNA |
| 43 | DOWN | AA402766 | 20357549 | NM_014313 | Homo sapiens small membrane protein 1 (SMP1), mRNA |
| 44 | DOWN | AA487243 | 21071076 | NM_014992 | Homo sapiens dishevelled associated activator of morphogenesis 1 (DAAM1), mRNA |
| 45 | DOWN | AA598780 | 21237785 | NM_014776 | Homo sapiens G protein-coupled receptor kinase interactor 2 (GIT2), transcript variant 3, mRNA |
| 46 | DOWN | W32408 | 21265083 | NM_020236 | Homo sapiens mitochondrial ribosomal protein L1 (MRPL1), nuclear gene encoding mitochondrial protein, mRNA |
| 47 | DOWN | AA971699 | 21327694 | NM_139264.1 | Homo sapiens ADAMTS-like 1 (ADAMTSL1), transcript variant 3, mRNA |
| 48 | UP | AA666316 | 21361102 | NM_003705.2 | Homo sapiens solute carrier family 25 (mitochondrial carrier, Aralar), member 12 (SLC25A12), |
| | | | | | mRNA |
| 49 | DOWN | H03040 | 21361391 | NM_006905 | Homo sapiens pregnancy specific beta-1-glycoprotein 1 (PSG1), mRNA |
| 50 | DOWN | R56877 | 21361486 | NM_015595.2 | Homo sapiens Src homology 3 domain-containing guanine nucleotide exchange factor (SGEF), |
| | | | | | mRNA |
| 51 | DOWN | T70901 | 21361540 | NM_016400 | Homo sapiens Huntingtin interacting protein K (HYPK), mRNA |
| 52 | DOWN | AA446864 | 21361616 | NM_019000 | Homo sapiens hypothetical protein FLJ20152 (FLJ20152), mRNA |
| 53 | UP | AA630354 | 21361698 | NM_020126 | Homo sapiens sphingosine kinase 2 (SPHK2), mRNA |
| 54 | DOWN | T85191 | 21361813 | NM_019118 | Homo sapiens hypothetical protein RP4-622L5, (RP4-622L5), mRNA |
| 55 | DOWN | AA862473 | 21361833 | NM_020372.2 | Homo sapiens solute carrier family 22 (organic cation transporter), member 17 (SLC22A17), transcript variant 1, mRNA |
| 56 | UP | AA465381 | 21361958 | NM_025181.2 | Homo sapiens solute carrier family 35, member F5 (SLC35F5), mRNA |
| 57 | UP | W84815 | 21362109 | NM_022445 | Homo sapiens thiamin pyrophosphokinase 1 (TPK1), mRNA |
| 58 | DOWN | N20072 | 21389336 | NM_144563 | Homo sapiens ribose 5-phosphate isomerase A (ribose 5-phosphate epimerase) (RPIA), mRNA |
| 59 | DOWN | AA913839 | 21396501 | NM_022142.3 | Homo sapiens epididymal sperm binding protein 1 (ELSPBP1), mRNA |
| 60 | UP | AI681015 | 21450784 | NM_004232.2 | Homo sapiens suppressor of cytokine signaling 6 (SOCS6), mRNA |
| 61 | UP | AI025520 | 21493038 | NM_139289.1 | Homo sapiens A kinase (PRKA) anchor protein 4 (AKAP4), transcript variant 2, mRNA |
| 62 | UP | H29322 | 21536281 | NM_003656 | Homo sapiens calcium/calmodulin-dependent Protein kinase I (CAMK1), mRNA |
| 63 | DOWN | AA286814 | 21536339 | NM_012468.3 | Homo sapiens T-cell leukemia/lymphoma 6 (TCL6), transcript variant TCL6a1, mRNA |
| 64 | UP | AA521292 | 21536375 | NM_005502.2 | Homo sapiens ATP-binding cassette, sub-family A (ABC1), member 1 (ABCA1), mRNA |
| 65 | UP | AI281149 | 21536483 | NM_005339.3 | Homo sapiens huntingtin interacting protein 2 (HIP2), mRNA |
| 66 | DOWN | AA039929 | 21614500 | NM_144780 | Homo sapiens degenerative spermatocyte homolog 1, lipid desaturase (Drosophila) (DEGS1), transcript variant 2, mRNA |
| 67 | UP | AI276917 | 21699059 | NM_144976.1 | Homo sapiens zinc finger protein 564 (ZNF564), mRNA |
| 68 | UP | AI024655 | 21717806 | NM_145647.1 | Homo sapiens unknown MGC21654 product (MGC21654), mRNA |
| 69 | DOWN | AA857804 | 21735568 | NM_022111.2 | Homo sapiens claspin homolog (Xenopus laevis) (CLSPN), mRNA |
| 70 | UP | AA677317 | 22091459 | NM_014248.2 | Homo sapiens ring-box 1 (RBX1), mRNA |
| 71 | DOWN | T50747 | 22095354 | NM_017693.2 | Homo sapiens basic, immunoglobulin-like variable motif containing (BIVM), mRNA |
| 72 | UP | AA496047 | 22538408 | NM_145893.1 | Homo sapiens ataxin 2-binding protein 1 (A2BP1), transcript variant 3, mRNA |
| 73 | UP | AI364359 | 22547196 | NM_007129.2 | Homo sapiens Zic family member 2 (odd-paired homolog, Drosophila) (ZIC2), mRNA |
| 74 | DOWN | AA453585 | 22749104 | NM_152533.1 | Homo sapiens chromosome 3 open reading frame 22 (C3orf22), mRNA |
| 75 | UP | AA457490 | 22749478 | NM_152755 | Homo sapiens hypothetical protein MGC40499 (MGC40499), mRNA |
| 76 | DOWN | T90560 | 23097284 | NM_152299 | Homo sapiens hypothetical protein 384D8_6 (384D8-2), mRNA |
| 77 | DOWN | R22420 | 23111058 | NM_022776 | Homo sapiens oxysterol binding protein-like 11 (OSBPL11), mRNA |
| 78 | UP | AA485677 | 23308730 | NM_003302 | Homo sapiens thyroid hormone receptor interactor 6 (TRIP6), mRNA |
| 79 | UP | AI473374 | 23510417 | NM_153189.1 | Homo sapiens sperm adhesion molecule 1 (PH-20 hyaluronidase. zona pellucida binding) |
| | | | | | (SPAM1), transcript variant 2, mRNA |
| 80 | DOWN | N51304 | 23821014 | NM_016544 | Homo sapiens Ras-associated protein Rap1 (RBJ), mRNA |
| 81 | DOWN | H65034 | 24429565 | NM_002603 | Homo sapiens phosphodiesterase 7A (PDE7A), transcript variant 1, mRNA |
| 82 | DOWN | AA678306 | 24431986 | NM_018452 | Homo sapiens chromosome 6 open reading frame 35 (C6orf35), mRNA |
| 83 | UP | AA676673 | 24431998 | NM_022836.2 | Homo sapiens DNA cross-link repair 1B (PSO2 homolog, S. cerevisiae) (DCLRE1B), mRNA |
| 84 | UP | AA634427 | 24475639 | NM_018405.2 | Homo sapiens hypothetical protein, clone 2746033 (HSA272196), mRNA |
| 85 | DOWN | AA454564 | 24475811 | NM_019557 | Homo sapiens hypothetical protein RP1-317E23 (LOC56181), mRNA |
| 86 | DOWN | AA916325 | 24497582 | NM_003739 | Homo sapiens aldo-keto reductase family 1, member C3 (3-alpha hydroxysteroid |
| | | | | | dehydrogenase, type II) (AKR1C3), mRNA |
| 87 | UP | AA455242 | 24497619 | NM_014230 | Homo sapiens signal recognition particle 68 kDa (SRP68), mRNA |
| 88 | DOWN | AA777219 | 25777693 | NM_171982.1 | Homo sapiens tripartite motif-containing 35 (TRIM35), transcript variant 2, mRNA |
| 89 | UP | AA610005 | 25777695 | NM_021253.2 | Homo sapiens tripartite motif-containing 39 (TRIM39), transcript variant 1, mRNA |
| 90 | DOWN | AI279844 | 25914748 | NM_033450.2 | Homo sapiens ATP-binding cassette, sub-family C (CFTR/MRP), member 10 (ABCC10), mRNA |
| 91 | DOWN | AA864875 | 26667173 | NM_172178.1 | Homo sapiens mitochondrial ribosomal protein L42 (MRPL42), nuclear gene encoding |
| | | | | | mitochondrial protein, transcript variant 3, mRNA |
| 92 | DOWN | AA983462 | 27436949 | NM_005573.2 | Homo sapiens lamin B1 (LMNB1), mRNA |
| 93 | DOWN | AA976171 | 27436956 | NM_012301.2 | Homo sapiens atrophin-1 interacting protein 1 (AIP1), mRNA |
| 94 | UP | R49756 | 27436961 | NM_003471.2 | Homo sapiens potassium voltage-gated channel, shaker-related subfamily, beta member 1 |
| | | | | | (KCNAB1), transcript variant 2, mRNA |
| 95 | UP | AI347604 | 27734778 | NM_173666.1 | Homo sapiens hypothetical protein FLJ33977 (FLJ33977), mRNA |
| 96 | DOWN | H09541 | 27734858 | NM_173662 | Homo sapiens ring finger protein 175 (RNF175), mRNA |
| 97 | DOWN | AA405558 | 27735098 | NM_173497 | Homo sapiens HECT domain containing 2 (HECTD2), transcript variant 2, mRNA |
| 98 | DOWN | AA127221 | 27894327 | NM_003856 | Homo sapiens interleukin 1 receptor-like 1 (IL1RL1), transcript variant 2, mRNA |
| 99 | DOWN | AA424734 | 28212219 | NM_175569 | Homo sapiens Xg blood group (pseudoautosomal boundary-divided on the X chromosome) |
| | | | | | (XG), mRNA |
| 100 | DOWN | AA780712 | 28372492 | NM_003588.2 | Homo sapiens cullin 4B (CUL4B), mRNA |
| 101 | DOWN | R40567 | 28558972 | NM_004229 | Homo sapiens cofactor required for Sp1 transcriptional activation, subunit 2, 150 kDa (CRSP2), |
| | | | | | mRNA |
| 102 | DOWN | H05445 | 28872807 | NM_002045 | Homo sapiens growth associated protein 43 (GAP43), mRNA |
| 103 | UP | AA706969 | 28872813 | NM_017893 | Homo sapiens sema domain, immunoglobulin domain (Ig), transmembrane domain (TM) and |
| | | | | | short cytoplasmic domain, (semaphorin) 4G (SEMA4G), mRNA |
| 104 | DOWN | AI167231 | 29171743 | NM_003712.2 | Homo sapiens phosphatidic acid phosphatase type 2C (PPAP2C), transcript variant 1, mRNA |
| 105 | DOWN | W67243 | 29244580 | NM_015336 | Homo sapiens zinc finger, DHHC domain containing 17 (ZDHHC17), mRNA |
| 106 | UP | T62529 | 29294623 | NM_177542 | Homo sapiens small nuclear ribonucleoprotein D2 polypeptide 16.5 kDa (SNRPD2), transcript |
| | | | | | variant 2, mRNA |
| 107 | UP | R00103 | 29826320 | NM_014189.2 | Homo sapiens adducin 1 (alpha) (ADD1), transcript variant 2, mRNA |
| 108 | DOWN | N51651 | 29826340 | NM_015099 | Homo sapiens calmodulin binding transcription activator 2 (CAMTA2), mRNA |
| 109 | DOWN | R38540 | 30410709 | NM_019053 | Homo sapiens SEC15-like 1 (S. cerevisiae) (SEC15L1), mRNA |
| 110 | DOWN | AI017130 | 30474868 | NM_032023.3 | Homo sapiens Ras association (RaIGDS/AF-6) domain family 4 (RASSF4), transcript variant 1, |
| | | | | | mRNA |
| 111 | DOWN | R39111 | 31317227 | NM_004430 | Homo sapiens early growth response 3 (EGR3), mRNA |
| 112 | UP | AA482251 | 31317308 | NM_012398 | Homo sapiens phosphatidylinositol-4-phosphate 5-kinase, type I, gamma (PIP5K1C), mRNA |
| 113 | UP | R47938 | 31341099 | NM_173795 | Homo sapiens hypothetical protein FLJ32096 (FLJ32096), mRNA |
| 114 | DOWN | AA903140 | 31341355 | NM_174902.2 | Homo sapiens hypothetical protein LOC143458 (LOC143458), mRNA |
| 115 | UP | AA927911 | 31341399 | NM_174939.2 | Homo sapiens hypothetical protein MGC39681 (MGC39681), mRNA |
| 116 | UP | AA187287 | 31343354 | NM_177453 | Homo sapiens progestin and adipoQ receptor family member III (PAQR3), mRNA |
| 117 | UP | H16796 | 31377664 | NM_031954 | Homo sapiens potassium channel tetramerisation domain containing 10 (KCTD10), mRNA |
| 118 | DOWN | AA521035 | 31377836 | NM_024622.2 | Homo sapiens hypothetical protein FLJ21901 (FLJ21901), mRNA |
| 119 | DOWN | AI675889 | 31542152 | NM_000905.2 | Homo sapiens neuropeptide Y (NPY), mRNA |
| 120 | UP | AA410375 | 31542848 | NM_006877 | Homo sapiens guanosine monophosphate reductase (GMPR), mRNA |
| 121 | UP | AI215689 | 31543168 | NM_032701.2 | Homo sapiens suppressor of variegation 4-20 homolog 2 (Drosophila) (SUV420H2), mRNA |
| 122 | UP | N90051 | 31543398 | NM_018367 | Homo sapiens phytoceramidase, alkaline (PHCA), mRNA |
| 123 | DOWN | N63635 | 31543400 | NM_002648 | Homo sapiens pim-1 oncogene (PIM1), mRNA |
| 124 | DOWN | AA443121 | 31543411 | NM_024310 | Homo sapiens pleckstrin homology domain containing, family F (with FYVE domain) member 1 |
| | | | | | (PLEKHF1), mRNA |
| 125 | UP | AA504615 | 31543656 | NM_006804 | Homo sapiens START domain containing 3 (STARD3), mRNA |
| 126 | DOWN | AA946732 | 31563510 | NM_015666.2 | Homo sapiens GTP binding protein 5 (putative) (GTPBP5), mRNA |
| 127 | DOWN | AA928656 | 31563516 | NM_006183.3 | Homo sapiens neurotensin (NTS), mRNA |
| 128 | DOWN | AA463461 | 31563520 | NM_024325 | Homo sapiens zinc finger protein 343 (ZNF343), mRNA |
| 129 | DOWN | AA291137 | 31581540 | NM_153689.3 | Homo sapiens hypothetical protein FLJ38973 (FLJ38973), mRNA |
| 130 | DOWN | AI276745 | 31881629 | NM_000956.2 | Homo sapiens prostaglandin E receptor 2 (subtype EP2), 53 kDa (PTGER2), mRNA |
| 131 | UP | AA885478 | 31982920 | NM_024749.2 | Homo sapiens hypothetical protein FLJ12505 (FLJ12505), mRNA |
| 132 | UP | AA777803 | 31982935 | NM_003901.2 | Homo sapiens sphingosine-1-phosphate lyase 1 (SGPL1), mRNA |
| 133 | DOWN | AA452257 | 32130532 | NM_181618 | Homo sapiens chemokine-like factor super family 5 (CKLFSF5), transcript variant 2, mRNA |
| 134 | UP | AA417744 | 32526889 | NM_152515.2 | Homo sapiens hypothetical protein FLJ40629 (FLJ40629), mRNA |
| 135 | DOWN | AA789328 | 32528262 | NM_003674 | Homo sapiens cyclin-dependent kinase (CDC2-like) 10 (CDK10), transcript variant 1, mRNA |
| 136 | DOWN | AA676660 | 32698685 | NM_014568.1 | Homo sapiens UDP-N-acetyl-alpha-D-galactosamine:polypeptide N- |
| | | | | | acetylgalactosaminyltransferase 5 (GalNAc-T5) (GALNT5), mRNA |
| 137 | DOWN | AA788805 | 32698729 | NM_020772 | Homo sapiens 82-kD FMRP Interacting Protein (182-FIP), mRNA |
| 138 | UP | N51614 | 33356147 | NM_005892 | Homo sapiens formin-like 1 (FMNL1), mRNA |
| 139 | DOWN | AI207748 | 33469927 | NM_024553.2 | Homo sapiens hypothetical protein FLJ20097 (FLJ20097), transcript variant 2, mRNA |
| 140 | DOWN | AA733195 | 33469972 | NM_016006 | Homo sapiens abhydrolase domain containing 5 (ABHD5), mRNA |
| 141 | DOWN | AA281733 | 33519477 | NM_001412 | Homo sapiens eukaryotic translation initiation factor 1A, X-linked (EIF1AX), mRNA |
| 142 | UP | H99824 | 33598951 | NM_006466.2 | Homo sapiens polymerase (RNA) III (DNA directed) polypeptide F, 39 kDa (POLR3F), mRNA |
| 143 | DOWN | H22826 | 33598967 | NM_005358 | Homo sapiens LIM domain 7 (LMO7), mRNA |
| 144 | UP | AA699808 | 33667066 | NM_014266.3 | Homo sapiens hematopoietic cell signal transducer (HCST), transcript variant 1, mRNA |
| 145 | DOWN | AA884159 | 33667114 | NM_182947.1 | Homo sapiens RAC/CDC42 exchange factor (GEFT), transcript variant 1, mRNA |
| 146 | UP | AA488868 | 33946290 | NM_024830.3 | Homo sapiens hypothetical protein FLJ12443 (FLJ12443), mRNA |
| 147 | UP | H83924 | 33946298 | NM_017922.2 | Homo sapiens PRP39 pre-mRNA processing factor 39 homolog (yeast) (PRPF39), mRNA |
| 148 | UP | AA905362 | 33946322 | NM_001177.3 | Homo sapiens ADP-ribosylation factor-like 1 (ARL1), mRNA |
| 149 | DOWN | AA984456 | 34101289 | NM_012306.2 | Homo sapiens Fas apoptotic inhibitory molecule 2 (FAIM2), mRNA |
| 150 | UP | AI203283 | 34147439 | NM_032726.2 | Homo sapiens phospholipase C, delta 4 (PLCD4), mRNA |
| 151 | DOWN | AA156247 | 34147494 | NM_004155 | Homo sapiens serine (or cysteine) proteinase inhibitor, clade 8 (ovalbumin), member 9 |
| | | | | | (SERPINB9), mRNA |
| 152 | DOWN | AA143609 | 34222091 | NM_001547.3 | Homo sapiens interferon-induced protein with tetratricopeptide repeats 2 (IFIT2), mRNA |
| 153 | UP | H79839 | 34222140 | NM_138774.2 | Homo sapiens chromosome 19 open reading frame 22 (C19orf22), mRNA |
| 154 | UP | AI024524 | 34222158 | NM_018275.3 | Homo sapiens hypothetical protein FLJ10925 (FLJ10925), mRNA |
| 155 | UP | AA703250 | 34222192 | NM_004697 | Homo sapiens PRP4 pre-mRNA processing factor 4 homolog (yeast) (PRPF4), mRNA |
| 156 | DOWN | N48345 | 34222238 | NM_173680 | Homo sapiens hypothetical protein MGC33584 (MGC33584), mRNA |
| 157 | UP | AA778089 | 34222384 | NM_020873.3 | Homo sapiens leucine rich repeat neuronal 1 (LRRN1), mRNA |
| 158 | UP | AI000878 | 34303919 | NM_024036.3 | Homo sapiens leucine rich repeat and fibronectin type III domain containing 4 (LRFN4), mRNA |
| 159 | DOWN | T47443 | 34335271 | NM_006404 | Homo sapiens protein C receptor, endothelial (EPCR) (PROCR), mRNA |
| 160 | UP | AA478794 | 34335395 | NM_032515 | Homo sapiens BCL2-related ovarian killer (BOK), mRNA |
| 161 | DOWN | AA128457 | 34452689 | NM_002928.2 | Homo sapiens regulator of G-protein signalling 16 (RGS16), mRNA |
| 162 | UP | AI671599 | 34485728 | NM_002556.2 | Homo sapiens oxysterol binding protein (OSBP), mRNA |
| 163 | DOWN | T89996 | 34734076 | NM_005438 | Homo sapiens FOS-like antigen 1 (FOSL1), mRNA |
| 164 | DOWN | N57657 | 34850073 | NM_016080 | Homo sapiens chromosome 17 open reading frame 25 (C17orf25), mRNA |
| 165 | DOWN | AI300766 | 34878715 | NM_003989.2 | Homo sapiens paired box gene 2 (PAX2), transcript variant d, mRNA |
| 166 | UP | AI291692 | 37059748 | NM_022771.3 | Homo sapiens TBC1 domain family, member 15 (TBC1D15), mRNA |
| 167 | UP | AA101088 | 37059777 | NM_017846.3 | Homo sapiens tRNA selenocysteine associated protein (SECP43), mRNA |
| 168 | UP | AA406206 | 37537711 | NM_022140 | Homo sapiens erythrocyte membrane protein band 4.1 like 4A (EPB41L4A), mRNA |
| 169 | UP | R01227 | 37577121 | NM_016021 | Homo sapiens ubiquitin-conjugating enzyme E2, J1 (UBC6 homolog, yeast) (UBE2J1), mRNA |
| 170 | UP | AA971179 | 37594445 | NM_138462.2 | Homo sapiens zinc finger, MYND domain containing 19 (ZMYND19), mRNA |
| 171 | DOWN | AA775791 | 37594454 | NM_032327.2 | Homo sapiens zinc finger, DHHC domain containing 16 (ZDHHC16), transcript variant 1, mRNA |
| 172 | DOWN | AI026814 | 37595546 | NM_002610.3 | Homo sapiens pyruvate dehydrogenase kinase, isoenzyme 1 (PDK1), nuclear gene encoding mitochondrial protein, mRNA |
| 173 | DOWN | AI016074 | 37655176 | NM_018355.2 | Homo sapiens zinc finger protein 415 (ZNF415), mRNA |
| 174 | DOWN | AA490605 | 37693523 | NM_014795 | Homo sapiens zinc finger homeobox 1b (ZFHX1B), mRNA |
| 175 | UP | AA670408 | 37704380 | NM_004048 | Homo sapiens beta-2-microglobulin (B2M), mRNA |
| 176 | UP | N53664 | 38016946 | NM_001735 | Homo sapiens complement component 5 (C5), mRNA |
| 177 | DOWN | N35020 | 38045936 | NM_016422 | Homo sapiens ring finger protein 141 (RNF141), mRNA |
| 178 | DOWN | W95118 | 38045937 | NM_014746 | Homo sapiens ring finger protein 144 (RNF144), mRNA |
| 179 | DOWN | AA101146 | 38176150 | NM_030650 | Homo sapiens KIAA1715 (KIAA1715), mRNA |
| 180 | UP | AA521473 | 38202212 | NM_006544.2 | Homo sapiens SEC10-like 1 (S. cerevisiae) (SEC10L1), mRNA |
| 181 | UP | AA454819 | 38257140 | NM_002746 | Homo sapiens mitogen-activated protein kinase 3 (MAPK3), mRNA |
| 182 | UP | AA917493 | 38348255 | NM_198468.1 | Homo sapiens chromosome 6 open reading frame 167 (C6orf167), mRNA |
| 183 | UP | AA885471 | 38348371 | NM_198537.1 | Homo sapiens FLJ44968 protein (FLJ44968), mRNA |
| 184 | DOWN | R00276 | 38454325 | NM_001775 | Homo sapiens CD38 antigen (p45) (CD38), mRNA |
| 185 | UP | H87275 | 38455387 | NM_001463 | Homo sapiens frizzled-related protein (FRZB), mRNA |
| 186 | DOWN | N30047 | 38504664 | NM_198845.1 | Homo sapiens sialic acid binding Ig-like lectin 6 (SIGLEC6), transcript variant 2, mRNA |
| 187 | DOWN | AA972628 | 38504668 | NM_198833.1 | Homo sapiens serine (or cysteine) proteinase inhibitor, clade B (ovalbumin), member 8 |
| | | | | | (SERPINB8), transcript variant 2, mRNA |
| 188 | DOWN | AA465228 | 38505210 | NM_198847.1 | Homo sapiens FLJ22794 protein (FLJ22794), transcript variant 2, mRNA |
| 189 | DOWN | AA599085 | 38569483 | NM_017641 | Homo sapiens kinesin family member 21A (KIF21A), mRNA |
| 190 | UP | N29860 | 38570089 | NM_004804 | Homo sapiens WD repeat domain 39 (WDR39), mRNA |
| 191 | UP | AI015577 | 38570147 | NM_032196.3 | Homo sapiens homolog of yeast INO80 (INO80), transcript variant 2, mRNA |
| 192 | DOWN | AI198629 | 38570157 | NM_004561.2 | Homo sapiens ovo-like 1(Drosophila) (OVOL1), mRNA |
| 193 | DOWN | AA016290 | 38683863 | NM_018703 | Homo sapiens retinoblastoma binding protein 6 (RBBP6), transcript variant 2, mRNA |
| 194 | DOWN | AI015297 | 39545576 | NM_016626.2 | Homo sapiens ring finger and KH domain containing 2 (RKHD2), mRNA |
| 195 | DOWN | AI347886 | 39725687 | NM_005002.3 | Homo sapiens NADH dehydrogenase (ubiquinone) 1 alpha subcomplex, 9, 39 kDa (NDUFA9), |
| | | | | | mRNA |
| 196 | DOWN | H19340 | 39753954 | NM_016641 | Homo sapiens membrane interacting protein of RGS16 (MIR16), mRNA |
| 197 | UP | AA903500 | 39777595 | NM_021809.4 | Homo sapiens TGFB-induced factor 2 (TALE family homeobox) (TGIF2), mRNA |
| 198 | DOWN | AA633873 | 39812393 | NM_031922.2 | Homo sapiens RALBP1 associated Eps domain containing 1 (REPS1), mRNA |
| 199 | DOWN | N45114 | 39841070 | NM_199005 | Homo sapiens zinc finger protein 322B (ZNF322B), mRNA |
| 200 | DOWN | AI334945 | 39995095 | NM_000960.3 | Homo sapiens prostaglandin I2 (prostacyclin) receptor (IP) (PTGIR), mRNA |
| 201 | DOWN | R50752 | 40068496 | NM_024091 | Homo sapiens hypothetical protein MGC5297 (MGC5297), mRNA |
| 202 | DOWN | AA778204 | 40217846 | NM_014014.2 | Homo sapiens activating signal cointegrator 1 complex subunit 3-like 1 (ASCC3L1), mRNA |
| 203 | DOWN | AA419251 | 40254449 | NM_003641 | Homo sapiens interferon induced transmembrane protein 1 (9-27) (IFITM1), mRNA |
| 204 | DOWN | AA909947 | 40255051 | NM_024726.3 | Homo sapiens IQ motif containing with AAA domain (IQCA), mRNA |
| 205 | DOWN | R60949 | 40255107 | NM_153013 | Homo sapiens hypothetical protein FLJ30596 (FLJ30596), mRNA |
| 206 | DOWN | H17954 | 40255204 | NM_175908 | Homo sapiens hypothetical protein LOC284296 (LOC284296), mRNA |
| 207 | UP | AI243595 | 40255224 | NM_022757.3 | Homo sapiens coiled-coil domain containing 14 (CCDC14), mRNA |
| 208 | DOWN | W69677 | 40255239 | NM_018045 | Homo sapiens hypothetical protein FLJ10276 (FLJ10276), mRNA |
| 209 | UP | AA256378 | 40288292 | NM_000361 | Homo sapiens thrombomodulin (THBD), mRNA |
| 210 | DOWN | N66469 | 40317633 | NM_199040.1 | Homo sapiens nudix (nucleoside diphosphate linked moiety X)-type motif 4 (NUDT4), transcript |
| | | | | | variant 2, mRNA |
| 211 | DOWN | W81159 | 40353763 | NM_199186.1 | Homo sapiens 2,3-bisphosphoglycerate mutase (BPGM), transcript variant 2, mRNA |
| 212 | DOWN | AA187938 | 40556362 | NM_016489 | Homo sapiens 5′-nucleotidase, cytosolic III (NT5C3), mRNA |
| 213 | DOWN | AA490096 | 40805869 | NM_199363.1 | Homo sapiens tumor protein D52-like 2 (TPD52L2), transcript variant 4, mRNA |
| 214 | DOWN | AI361530 | 40807490 | NM_001995.2 | Homo sapiens acyl-CoA synthetase long-chain family member 1 (ACSL1), mRNA |
| 215 | UP | R39454 | 41150548 | XM_373748.1 | PREDICTED: Homo sapiens hypothetical LOC388418 (LOC388418), mRNA |
| 216 | DOWN | W93315 | 41197059 | XM_374162 | PREDICTED: Homo sapiens hypothetical LOC389370 (LOC389370), mRNA |
| 217 | UP | W79511 | 41281472 | NM_014738 | Homo sapiens KIAA0195 gene product (KIAA0195), mRNA |
| 218 | UP | AA903137 | 41281490 | NM_014791.2 | Homo sapiens maternal embryonic leucine zipper kinase (MELK), mRNA |
| 219 | DOWN | AA908831 | 41327688 | NM_199513.1 | Homo sapiens chromosome 20 open reading frame 44 (C20orf44), transcript variant 3, mRNA |
| 220 | DOWN | R35665 | 41327737 | NM_005228 | Homo sapiens epidermal growth factor receptor (erythroblastic leukemia viral (v-erb-b) oncogene |
| | | | | | homolog, avian) (EGFR), transcript variant 1, mRNA |
| 221 | UP | AA479950 | 41327759 | NM_198531 | Homo sapiens ATPase, Class II, type 9B (ATP9B), mRNA |
| 222 | DOWN | N27177 | 41349453 | NM_201348.1 | Homo sapiens proline arginine-rich end leucine-rich repeat protein (PRELP), transcript variant 2, |
| | | | | | mRNA |
| 223 | DOWN | AA463931 | 41393564 | NM_014216 | Homo sapiens inositol 1,3,4-triphosphate 5/6 kinase (ITPK1), mRNA |
| 224 | DOWN | R26706 | 41872473 | NM_001987 | Homo sapiens ets variant gene 6 (TEL oncogene) (ETV6), mRNA |
| 225 | UP | AA133278 | 42476161 | NM_005398.3 | Homo sapiens protein phosphatase 1, regulatory (inhibitor) subunit 3C (PPP1R3C), mRNA |
| 226 | UP | AI131103 | 42544171 | NM_201999.1 | Homo sapiens E74-like factor 2 (ets domain transcription factor) (ELF2), transcript variant 1, |
| | | | | | mRNA |
| 227 | UP | R91087 | 42655888 | XM_375713.1 | PREDICTED: Homo sapiens hypothetical protein LOC284551 (LOC284551), mRNA |
| 228 | UP | AI217650 | 42656708 | XM_211843.2 | PREDICTED: Homo sapiens hypothetical protein LOC285326 (LOC285326), mRNA |
| 229 | UP | AA670305 | 42656764 | XM_117294.6 | PREDICTED: Homo sapiens hypothetical protein LOC200933 (LOC200933), mRNA |
| 230 | DOWN | AA975399 | 42658265 | XM_380099.1 | PREDICTED: Homo sapiens hypothetical LOC402476 (LOC402476), mRNA |
| 231 | UP | AA609312 | 42658886 | XM_114621 | PREDICTED: Homo sapiens similar to RIKEN cDNA 4930578I06 (LOC203076), mRNA |
| 232 | DOWN | AA923560 | 42716282 | NM_024598.2 | Homo sapiens hypothetical protein FLJ13154 (FLJ13154), mRNA |
| 233 | DOWN | AA173423 | 42734437 | NM_016623 | Homo sapiens family with sequence similarity 49, member B (FAM49B), mRNA |
| 234 | DOWN | AA452256 | 42741683 | NM_203350 | Homo sapiens zinc finger protein 265 (ZNF265), transcript variant 1, mRNA |
| 235 | DOWN | AA626335 | 44662835 | NM_014567.2 | Homo sapiens breast cancer anti-estrogen resistance 1 (BCAR1), mRNA |
| 236 | UP | AI383794 | 44771197 | NM_005788.1 | Homo sapiens HMT1 hnRNP methyltransferase-like 3 (S. cerevisiae) (HRMT1L3), mRNA |
| 237 | DOWN | AA909958 | 44917609 | NM_020882.1 | Homo sapiens KIAA1510 protein (KIAA1510), mRNA |
| 238 | DOWN | AA706974 | 44955890 | NM_001656 | Homo sapiens tripartite motif-containing 23 (TRIM23), transcript variant alpha, mRNA |
| 239 | DOWN | AA448711 | 4502326 | NM_001698 | Homo sapiens AU RNA binding protein/enoyl-Coenzyme A hydratase (AUH), nuclear gene |
| | | | | | encoding mitochondrial protein, mRNA |
| 240 | DOWN | AA676453 | 4502662 | NM_001774 | Homo sapiens CD37 antigen (CD37), mRNA |
| 241 | DOWN | AA112105 | 4503770 | NM_002027 | Homo sapiens farnesyltransferase, CAAX box, alpha (FNTA), mRNA |
| 242 | UP | N69049 | 4503832 | NM_003507 | Homo sapiens frizzled homolog 7 (Drosophila) (FZD7), mRNA |
| 243 | DOWN | N30428 | 4504132 | NM_000176 | Homo sapiens nuclear receptor subfamily 3, group C, member 1 (glucocorticoid receptor) |
| | | | | | (NR3C1), mRNA |
| 244 | UP | AI201184 | 4504142 | NM_000842.1 | Homo sapiens glutamate receptor, metabotropic 5 (GRM5), mRNA |
| 245 | UP | AA774833 | 4505664 | NM_000923.1 | Homo sapiens phosphodiesterase 4C, cAMP-specific (phosphodiesterase E1 dunce homolog, |
| | | | | | Drosophila) (PDE4C), mRNA |
| 246 | DOWN | T70056 | 4506558 | NM_002940 | Homo sapiens ATP-binding cassette, sub-family E (OABP), member 1 (ABCE1), mRNA |
| 247 | UP | T87622 | 4506782 | NM_003864.1 | Homo sapiens sin3-associated polypeptide, 30 kDa (SAP30), mRNA |
| 248 | UP | AA460823 | 4506910 | NM_000023 | Homo sapiens sarcoglycan, alpha (50 kDa dystrophin-associated glycoprotein) (SGCA), mRNA |
| 249 | UP | AI369312 | 4507106 | NM_003086.1 | Homo sapiens small nuclear RNA activating complex, polypeptide 4, 190 kDa (SNAPC4), mRNA |
| 250 | UP | AA936434 | 4507398 | NM_003199.1 | Homo sapiens transcription factor 4 (TCF4), mRNA |
| 251 | UP | N55274 | 4507464 | NM_003239 | Homo sapiens transforming growth factor, beta 3 (TGFB3), mRNA |
| 252 | DOWN | AI652954 | 4507474 | NM_000359.1 | Homo sapiens transglutaminase 1 (K polypeptide epidermal type I, protein-glutamine-gamma- |
| | | | | | glutamyltransferase) (TGM1), mRNA |
| 253 | DOWN | AA235388 | 4507552 | NM_003275 | Homo sapiens tropomodulin 1 (TMOD1), mRNA |
| 254 | UP | T50788 | 4507818 | NM_001076 | Homo sapiens UDP glycosyltransferase 2 family, polypeptide B15 (UGT2B15), mRNA |
| 255 | DOWN | AA426227 | 4507834 | NM_000373 | Homo sapiens uridine monophosphate synthetase (orotate phosphoribosyl transferase and |
| | | | | | orotidine-5′-decarboxylase) (UMPS), mRNA |
| 256 | UP | R62340 | 45505138 | NM_152309 | Homo sapiens phosphoinositide-3-kinase adaptor protein 1 (PIK3AP1), mRNA |
| 257 | DOWN | AA826373 | 45545410 | NM_205842.1 | Homo sapiens NCK-associated protein 1 (NCKAP1), transcript variant 2, mRNA |
| 258 | UP | AI382422 | 4557256 | NM_001115.1 | Homo sapiens adenylate cyclase 8 (brain) (ADCY8), mRNA |
| 259 | DOWN | AA055163 | 4557408 | NM_001232 | Homo sapiens calsequestrin 2 (cardiac muscle) (CASQ2), mRNA |
| 260 | DOWN | N24824 | 4557694 | NM_000222 | Homo sapiens v-kit Hardy-Zuckerman 4 feline sarcoma viral oncogene homolog (KIT), mRNA |
| 261 | DOWN | H11482 | 4557879 | NM_000416 | Homo sapiens interferon gamma receptor 1 (IFNGR1), mRNA |
| 262 | DOWN | N63943 | 4557893 | NM_000239 | Homo sapiens lysozyme (renal amyloidosis) (LYZ), mRNA |
| 263 | UP | T70999 | 45827761 | NM_019075.2 | Homo sapiens UDP glycosyltransferase 1 family, polypeptide A10 (UGT1A10), mRNA |
| 264 | DOWN | N21237 | 45935384 | NM_015278 | Homo sapiens SAM and SH3 domain containing 1 (SASH1), mRNA |
| 265 | DOWN | AA916546 | 46048219 | NM_031949.3 | Homo sapiens tubulin tyrosine ligase-like family, member 2 (TTLL2), mRNA |
| 266 | UP | AA705999 | 46195722 | NM_015659 | Homo sapiens ribosomal L1 domain containing 1 (RSL1D1), mRNA |
| 267 | DOWN | AA426025 | 46249354 | NM_199332 | Homo sapiens homer homolog 2(Drosophila) (HOMER2), transcript variant 4, mRNA |
| 268 | DOWN | AA521439 | 46255067 | NM_206930.1 | Homo sapiens synaptotagmin-like 2 (SYTL2), transcript variant f, mRNA |
| 269 | UP | AI361112 | 46358421 | NM_002429.3 | Homo sapiens matrix metalloproteinase 19 (MMP19), transcript variant rasi-1, mRNA |
| 270 | DOWN | N58163 | 46397354 | NM_024345 | Homo sapiens WD repeat domain 32 (WDR32), mRNA |
| 271 | UP | AA971725 | 46397374 | NM_018150.2 | Homo sapiens hypothetical protein FLJ10597 (FLJ10597), mRNA |
| 272 | DOWN | AA884901 | 46409491 | NM_207434.1 | Homo sapiens FLJ46363 protein (FLJ46363), mRNA |
| 273 | DOWN | AA489017 | 46877103 | NM_003367 | Homo sapiens upstream transcription factor 2, c-fos interacting (USF2), transcript variant 1, |
| | | | | | mRNA |
| 274 | UP | AA394136 | 47078232 | NM_212503 | Homo sapiens PCTAIRE protein kinase 3 (PCTK3), transcript variant 1, mRNA |
| 275 | UP | AA005215 | 47157324 | NM_212539.1 | Homo sapiens protein kinase C, delta (PRKCD), transcript variant 2, mRNA |
| 276 | DOWN | AA683550 | 4755143 | NM_001569 | Homo sapiens interleukin-1 receptor-associated kinase 1 (IRAK1), mRNA |
| 277 | DOWN | AA027049 | 4757889 | NM_004337 | Homo sapiens chromosome 8 open reading frame 1 (C8orf1), mRNA |
| 278 | DOWN | AA479196 | 4758487 | NM_004128 | Homo sapiens general transcription factor IIF, polypeptide 2 (30 kD subunit) (GTF2F2), mRNA |
| 279 | DOWN | AA877255 | 4758609 | NM_001572 | Homo sapiens interferon regulatory factor 7 (IRF7), transcript variant a, mRNA |
| 280 | UP | AA425316 | 47778926 | NM_001001336 | Homo sapiens cytochrome b5 reductase b5R.2 (CYB5R2), transcript variant 2, mRNA |
| 281 | UP | AA425754 | 47933378 | NM_003827 | Homo sapiens N-ethylmaleimide-sensitive factor attachment protein, alpha (NAPA), mRNA |
| 282 | DOWN | AA044390 | 48255967 | NM_001001521 | Homo sapiens UDP-glucose pyrophosphorylase 2 (UGP2), transcript variant 2, mRNA |
| 283 | UP | AI016760 | 4826947 | NM_005044.1 | Homo sapiens protein kinase, X-linked (PRKX), mRNA |
| 284 | DOWN | W32509 | 48375181 | NM_012121 | Homo sapiens CDC42 effector protein (Rho GTPase binding) 4 (CDC42EP4), mRNA |
| 285 | DOWN | H22936 | 48675821 | NM_145257 | Homo sapiens LOC126731 (LOC126731), mRNA |
| 286 | UP | AI028325 | 50086627 | NM_145053.3 | Homo sapiens hypothetical protein MGC20470 (MGC20470), mRNA |
| 287 | UP | H43617 | 5031650 | NM_005671.1 | Homo sapiens reproduction 8 (D8S2298E), mRNA |
| 288 | UP | N26562 | 5031912 | NM_005511 | Homo sapiens melan-A (MLANA), mRNA |
| 289 | DOWN | N63628 | 50355983 | NM_024790 | Homo sapiens centrosome spindle pole associated protein (CSPP), mRNA |
| 290 | DOWN | AI015246 | 50659063 | NM_173360.2 | Homo sapiens spermatogenesis associated 9 (SPATA9), transcript variant 2, mRNA |
| 291 | DOWN | W59987 | 50726964 | NM_013392 | Homo sapiens nuclear receptor binding protein (NRBP), mRNA |
| 292 | DOWN | R34323 | 50843836 | NM_018071 | Homo sapiens hypothetical protein FLJ10357 (FLJ10357), mRNA |
| 293 | DOWN | AI016456 | 50897271 | NM_001002910.1 | Homo sapiens cytochrome P450, family 2, subfamily D, polypeptide 7 pseudogene 1 |
| | | | | | (CYP2D7P1), mRNA |
| 294 | DOWN | H23444 | 50962798 | NM_213609 | Homo sapiens family with sequence similarity 19 (chemokine (C—C motif)-like), member A1 |
| | | | | | (FAM19A1), mRNA |
| 295 | DOWN | AA598573 | 51100963 | NM_025154 | Homo sapiens unc-84 homolog A (C. elegans) (UNC84A), mRNA |
| 296 | DOWN | W81563 | 51173146 | NM_000232 | Homo sapiens sarcoglycan, beta (43 kDa dystrophin-associated glycoprotein) (SGCB), mRNA |
| 297 | DOWN | AI014441 | 51173747 | NM_001003397.1 | Homo sapiens tumor protein D52-like 1 (TPD52L1), transcript variant 4, mRNA |
| 298 | DOWN | AA989225 | 51243060 | NM_014507.2 | Homo sapiens malonyl-CoA: acyl carrier protein transacylase, mitochondrial (MT), nuclear gene |
| | | | | | encoding mitochondrial protein, transcript variant 2, mRNA |
| 299 | UP | R74169 | 51458700 | XM_496405 | PREDICTED: Homo sapiens similar to D(1B) dopamine receptor (D(5) dopamine receptor) |
| | | | | | (D1beta dopamine receptor) (LOC440684), mRNA |
| 300 | DOWN | R51886 | 51460531 | XM_039676 | PREDICTED: Homo sapiens KIAA1240 protein (KIAA1240), mRNA |
| 301 | DOWN | AA954477 | 51464134 | XM_379262.2 | PREDICTED: Homo sapiens hypothetical LOC401124 (LOC401124), mRNA |
| 302 | UP | AA862946 | 51464169 | XM_373030.3 | PREDICTED: Homo sapiens hypothetical protein LOC285556 (LOC285556), mRNA |
| 303 | DOWN | AA026276 | 51464481 | XM_374078 | PREDICTED: Homo sapiens hypothetical protein LOC285548 (LOC285548), mRNA |
| 304 | UP | AA287347 | 51465304 | XM_371848.3 | PREDICTED: Homo sapiens chromosome 6 open reading frame 115 (C6orf115), mRNA |
| 305 | DOWN | AI003036 | 51465523 | XR_000208.3 | PREDICTED: Homo sapiens zinc finger protein 204 (ZNF204), misc RNA |
| 306 | DOWN | AA482282 | 51466733 | XM_372035.2 | PREDICTED: Homo sapiens hypothetical LOC389643 (LOC389643), mRNA |
| 307 | UP | AI311125 | 51467635 | XM_499165.1 | PREDICTED: Homo sapiens hypothetical gene supported by AK024177 (LOC441468), mRNA |
| 308 | UP | AI301143 | 51470756 | XM_291947.5 | PREDICTED: Homo sapiens hephaestin-like (LOC341208), mRNA |
| 309 | DOWN | AA904604 | 51470865 | XM_096472.2 | PREDICTED: Homo sapiens similar to RIKEN cDNA 1700029I15 (LOC143678), mRNA |
| 310 | UP | AA402879 | 51471183 | XM_495908 | PREDICTED: Homo sapiens similar to DEAD/H (Asp-Glu-Ala-Asp/His) box polypeptide 11; yeast |
| | | | | | CHL1 homolog; DEAD/H box-11 (CHL1-related helicase gene-1); DEAD/H (Asp-Glu-Ala- |
| | | | | | Asp/His) box polypeptide 11 (S. cerevisiae CHL1-like helicase) (LOC440081), mRNA |
| 311 | UP | H71854 | 51471269 | XM_378389 | PREDICTED: Homo sapiens hypothetical LOC400084 (LOC400084), mRNA |
| 312 | UP | AI018012 | 51471411 | XM_498558.1 | PREDICTED: Homo sapiens LOC440127 (LOC440127), mRNA |
| 313 | DOWN | AA682634 | 51471757 | XM_113763.6 | PREDICTED: Homo sapiens chromosome 14 open reading frame 125 (C14orf125), mRNA |
| 314 | UP | AI023820 | 51472346 | XM_496061.1 | PREDICTED: Homo sapiens similar to FLJ44796 protein (LOC440264), mRNA |
| 315 | DOWN | AA429886 | 51472865 | XM_370965 | PREDICTED: Homo sapiens similar to hypothetical protein BC011981 (LOC388242), mRNA |
| 316 | DOWN | AA936435 | 51472989 | XM_373685.3 | PREDICTED: Homo sapiens hypothetical LOC388276 (LOC388276), mRNA |
| 317 | UP | R39110 | 51474260 | XM_375456.2 | PREDICTED: Homo sapiens hypothetical protein DKFZp761G2113 (DKFZp761G2113), mRNA |
| 318 | DOWN | AA682513 | 51474376 | XM_294894.2 | PREDICTED: Homo sapiens hypothetical LOC339281 (LOC339281), mRNA |
| 319 | UP | AA219282 | 51474582 | XM_371116 | PREDICTED, Homo sapiens myosin VB (MYO5B), mRNA |
| 320 | DOWN | AA131794 | 51474602 | XM_378758 | PREDICTED: Homo sapiens hypothetical LOC400660 (LOC400660), mRNA |
| 321 | DOWN | AA446005 | 51475168 | XM_045421 | PREDICTED: Homo sapiens chromosome 20 open reading frame 194 (C20orf194), mRNA |
| 322 | DOWN | AA873159 | 51944963 | NM_001645 | Homo sapiens apolipoprotein C-I (APOC1), mRNA |
| 323 | UP | N71959 | 52138573 | NM_031465.2 | Homo sapiens hypothetical protein MGC13204 (MGC13204), mRNA |
| 324 | DOWN | W47387 | 52630437 | NM_005665 | Homo sapiens ecotropic viral integration site 5 (EVI5), mRNA |
| 325 | UP | AA164782 | 52694670 | NM_031461 | Homo sapiens cysteine-rich secretory protein LCCL domain containing 1 (CRISPLD1), mRNA |
| 326 | UP | AA706968 | 53729321 | NM_001005414 | Homo sapiens ZW10 interactor (ZWINT), transcript variant 4, mRNA |
| 327 | DOWN | W69269 | 53729347 | NM_007183.2 | Homo sapiens plakophilin 3 (PKP3), mRNA |
| 328 | DOWN | AA885140 | 53759068 | NM_017923.2 | Homo sapiens membrane-associated ring finger (C3HC4) 1 (MARCH1), mRNA |
| 329 | DOWN | T54342 | 53832029 | NM_016433 | Homo sapiens glycolipid transfer protein (GLTP), mRNA |
| 330 | DOWN | AA971634 | 53832030 | NM_004489.4 | Homo sapiens G protein pathway suppressor 2 (GPS2), mRNA |
| 331 | DOWN | AA644224 | 54112402 | NM_017780.2 | Homo sapiens chromodomain helicase DNA binding protein 7 (CHD7), mRNA |
| 332 | DOWN | AA620960 | 54262138 | NM_053064.2 | Homo sapiens guanine nucleotide binding protein (G protein), gamma 2 (GNG2), mRNA |
| 333 | UP | N38852 | 54262144 | NM_198484.2 | Homo sapiens zinc finger protein 621 (ZNF621), mRNA |
| 334 | DOWN | AA974801 | 5453596 | NM_006135.1 | Homo sapiens capping protein (actin filament) muscle Z-line, alpha 1 (CAPZA1), mRNA |
| 335 | DOWN | AA991931 | 5454045 | NM_006323.1 | Homo sapiens SEC24 related gene family, member B (S. cerevisiae) (SEC24B), mRNA |
| 336 | DOWN | AA279990 | 5454101 | NM_006342 | Homo sapiens transforming, acidic coiled-coil containing protein 3 (TACC3), mRNA |
| 337 | DOWN | R68828 | 54607076 | NM_023016.2 | Homo sapiens chromosome 2 open reading frame 26 (C2orf26), mRNA |
| 338 | UP | H18640 | 54792076 | NM_001006635.1 | Homo sapiens metaxin 2 (MTX2), transcript variant 2, mRNA |
| 339 | UP | AA779733 | 55741652 | NM_020931.1 | Homo sapiens KIAA1586 (KIAA1586), mRNA |
| 340 | DOWN | AA425435 | 55742785 | NM_020754 | Homo sapiens Cdc42 GTPase-activating protein (CDGAP), mRNA |
| 341 | UP | R23251 | 55743087 | NM_001006942 | Homo sapiens asparagine-linked glycosylation 3 homolog (yeast, alpha-1,3- |
| | | | | | mannosyltransferase) (ALG3), transcript variant 2, mRNA |
| 342 | DOWN | N34426 | 55749768 | NM_020943 | Homo sapiens KIAA1604 protein (KIAA1604), mRNA |
| 343 | UP | R91516 | 55953105 | NM_001007267 | Homo sapiens phospholipase A2 receptor 1, 180 kDa (PLA2R1), transcript variant 2, mRNA |
| 344 | DOWN | AA232647 | 56118213 | NM_007146 | Homo sapiens zinc finger protein 161 (ZNF161), mRNA |
| 345 | DOWN | AA878455 | 56243589 | NM_018383.3 | Homo sapiens WD repeat domain 33 (WDR33), transcript variant 1, mRNA |
| 346 | DOWN | R67903 | 56549112 | NM_016216 | Homo sapiens debranching enzyme homolog 1 (S. cerevisiae) (DBR1), mRNA |
| 347 | UP | AA709322 | 56550119 | NM_017619.3 | Homo sapiens RNA-binding region (RNP1, RRM) containing 3 (RNPC3), mRNA |
| 348 | UP | AA433885 | 56606138 | NM_001008234 | Homo sapiens hypothetical gene supported by BC036588 (LOC400657), mRNA |
| 349 | DOWN | AA443302 | 56676394 | NM_005168 | Homo sapiens Rho family GTPase 3 (RND3), mRNA |
| 350 | DOWN | AA421270 | 56699479 | NM_015622 | Homo sapiens chromosome 7 open reading frame 28A (C7orf28A), mRNA |
| 351 | UP | AA112057 | 56711247 | NM_015137 | Homo sapiens KIAA0143 protein (KIAA0143), mRNA |
| 352 | UP | R55763 | 56711259 | NM_020819 | Homo sapiens KIAA1411 (KIAA1411), mRNA |
| 353 | DOWN | AA936454 | 56711311 | NM_018555.4 | Homo sapiens zinc finger protein 331 (ZNF331), mRNA |
| 354 | DOWN | AA621302 | 56711315 | NM_173551 | Homo sapiens sterile alpha motif domain containing 6 (SAMD6), mRNA |
| 355 | UP | W90716 | 56788369 | NM_012455.2 | Homo sapiens pleckstrin and Sec7 domain containing 4 (PSD4), mRNA |
| 356 | DOWN | AA772502 | 56788376 | NM_001008564 | Homo sapiens nucleoporin like 1 (NUPL1), transcript variant 2, mRNA |
| 357 | UP | AA215643 | 57242804 | NM_001008744.1 | Homo sapiens tyrosyl-DNA phosphodiesterase 1 (TDP1), transcript variant 2, mRNA |
| 358 | UP | AA905085 | 57770637 | NR_002187.1 | Homo sapiens hypothetical protein LOC286016 (LOC286016) on chromosome 7 |
| 359 | DOWN | AA171735 | 57863270 | NM_015058 | Homo sapiens KIAA0564 protein (KIAA0564), transcript variant 1, mRNA |
| 360 | DOWN | R49243 | 57863758 | NM_001009899 | Homo sapiens KIAA2018 (KIAA2018), mRNA |
| 361 | DOWN | W53016 | 58219791 | NM_001010942 | Homo sapiens RAP1B, member of RAS oncogene family (RAP1B), transcript variant 2, mRNA |
| 362 | UP | AA169801 | 58331110 | NM_019046.1 | Homo sapiens ankyrin repeat domain 16 (ANKRD16), transcript variant 1, mRNA |
| 363 | UP | R94601 | 58331194 | NM_015436 | Homo sapiens ring finger and CHY zinc finger domain containing 1 (RCHY1), transcript variant |
| | | | | | 1, mRNA |
| 364 | DOWN | AA148683 | 58532586 | NM_001002860 | Homo sapiens BTB (POZ) domain containing 7 (BTBD7), transcript variant 1, mRNA |
| 365 | UP | W45589 | 5902065 | NM_007042 | Homo sapiens ribonuclease P 14 kDa subunit (RPP14), mRNA |
| 366 | UP | AA985471 | 6005831 | NM_007221.1 | Homo sapiens polyamine-modulated factor 1 (PMF1), mRNA |
| 367 | DOWN | AA436187 | 6006013 | NM_000632 | Homo sapiens integrin, alpha M (complement component receptor 3, alpha; also known as |
| | | | | | CD11b (p170), macrophage antigen alpha polypeptide) (ITGAM), mRNA |
| 368 | DOWN | AA932441 | 6042195 | NM_003793.2 | Homo sapiens cathepsin F (CTSF), mRNA |
| 369 | DOWN | AA489033 | 61742163 | NM_001009894.2 | Homo sapiens hypothetical protein DKFZp434N2030 (DKFZp434N2030), mRNA |
| 370 | DOWN | T57765 | 61743953 | NM_001620 | Homo sapiens AHNAK nucleoprotein (desmoyokin) (AHNAK), transcript variant 1, mRNA |
| 371 | DOWN | AI338894 | 62241047 | NM_013231.4 | Homo sapiens fibronectin leucine rich transmembrane protein 2 (FLRT2), mRNA |
| 372 | DOWN | N48319 | 62243893 | NM_003567.2 | Homo sapiens breast cancer anti-estrogen resistance 3 (BCAR3), mRNA |
| 373 | UP | AA703019 | 62865646 | NM_016530.2 | Homo sapiens RAB8B, member RAS oncogene family (RAB8B), mRNA |
| 374 | UP | AA777584 | 63175651 | NM_153232.3 | Homo sapiens CREBBP/EP300 inhibitor 2 (CRI2), mRNA |
| 375 | UP | R51015 | 64085120 | NM_000369 | Homo sapiens thyroid stimulating hormone receptor (TSHR), transcript variant 1, mRNA |
| 376 | DOWN | AA400393 | 64276807 | NM_197941 | Homo sapiens a disintegrin-like and metalloprotease (reprolysin type) with thrombospondin type |
| | | | | | 1 motif, 6 (ADAMTS6), mRNA |
| 377 | DOWN | AA666096 | 64762483 | NM_001018055.1 | Homo sapiens chromosome X open reading frame 53 (CXorf53), transcript variant 2, mRNA |
| 378 | DOWN | AA903175 | 6679051 | NM_007360.1 | Homo sapiens killer cell lectin-like receptor subfamily K, member 1 (KLRK1), mRNA |
| 379 | UP | AA708940 | 6912481 | NM_012318.1 | Homo sapiens leucine zipper-EF-hand containing transmembrane protein 1 (LETM1), mRNA |
| 380 | DOWN | AA283007 | 6996012 | NM_006144 | Homo sapiens granzyme A (granzyme 1, cytotoxic T-lymphocyte-associated serine esterase 3) |
| | | | | | (GZMA), mRNA |
| 381 | DOWN | AA995904 | 7019370 | NM_013342.1 | Homo sapiens TCF3 (E2A) fusion partner (in childhood Leukemia) (TFPT), mRNA |
| 382 | UP | AI025113 | 7019492 | NM_013284.1 | Homo sapiens polymerase (DNA directed), mu (POLM), mRNA |
| 383 | DOWN | AA918328 | 7657045 | NM_014501.1 | Homo sapiens ubiquitin-conjugating enzyme E2S (UBE2S), mRNA |
| 384 | DOWN | R35079 | 7657674 | NM_014232 | Homo sapiens vesicle-associated membrane protein 2 (synaptobrevin 2) (VAMP2), mRNA |
| 385 | DOWN | AA427857 | 7661605 | NM_015658.1 | Homo sapiens DKFZP564C186 protein (DKFZP564C186), mRNA |
| 386 | DOWN | T77847 | 7661669 | NM_015677 | Homo sapiens SH3 domain containing, Ysc84-like 1 (S. cerevisiae) (SH3YL1), mRNA |
| 387 | DOWN | AA487265 | 7661907 | NM_014752 | Homo sapiens signal peptidase complex subunit 2 homolog (S. cerevisiae) (SPCS2), mRNA |
| 388 | UP | AA953508 | 7662121 | NM_015559.1 | Homo sapiens SET binding protein 1 (SETBP1), mRNA |
| 389 | DOWN | N56973 | 7662213 | NM_014789 | Homo sapiens zinc finger protein 623 (ZNF623), mRNA |
| 390 | DOWN | AA446839 | 7669480 | NM_004052 | Homo sapiens BCL2/adenovirus E1B 19 kDa interacting protein 3 (BNIP3), nuclear gene |
| | | | | | encoding mitochondrial protein, mRNA |
| 391 | DOWN | T55608 | 7705786 | NM_016022 | Homo sapiens anterior pharynx defective 1 homolog A (C. elegans) (APH1A), mRNA |
| 392 | DOWN | AI341526 | 7710111 | NM_015831.1 | Homo sapiens acetylcholinesterase (YT blood group) (ACHE), transcript variant E4-E5, mRNA |
| 393 | DOWN | H20204 | 8922076 | NM_018702 | Homo sapiens adenosine deaminase, RNA-specific, B2 (RED2 homolog rat) (ADARB2), mRNA |
| 394 | UP | R53470 | 8922630 | NM_018199.1 | Homo sapiens chromosome 14 open reading frame 114 (C14orf114), mRNA |
| 395 | DOWN | AA599183 | 8922678 | NM_018225 | Homo sapiens smu-1 suppressor of mec-8 and unc-52 homolog (C. elegans) (SMU1), mRNA |
| 396 | DOWN | AA905628 | 8922691 | NM_018231.1 | Homo sapiens amino acid transporter (FLJ10815), mRNA |
| 397 | DOWN | AA127861 | 8923142 | NM_017686 | Homo sapiens ganglioside induced differentiation associated protein 2 (GDAP2), mRNA |
| 398 | UP | AA063624 | 8923397 | NM_017816 | Homo sapiens hypothetical protein FLJ20425 (LYAR), mRNA |
| 399 | UP | T82457 | 8923474 | NM_017853.1 | Homo sapiens thioredoxin-like 4B (TXNL4B), mRNA |
| 400 | DOWN | AA960957 | 8923753 | NM_018401.1 | Homo sapiens serine/threonine kinase 32B (STK32B), mRNA |
| 401 | DOWN | AI184305 | 9945331 | NM_015675.1 | Homo sapiens growth arrest and DNA-damage-inducible, beta (GADD45B), mRNA |

[0130] TABLE 3
List of mRNAs differentially expressed in asthma subjects

| SEQ ID NO. | Regulation | Accession on chip |
|---|---|---|
| 402 | UP | AA913864 |
| 403 | DOWN | AI732176 |
| 404 | DOWN | AI732945 |
| 405 | DOWN | AI733047 |
| 406 | DOWN | AI733078 |
| 407 | UP | AI733081 |
| 408 | DOWN | AI733117 |
| 409 | DOWN | AI733136 |
| 410 | DOWN | AI733140 |
| 411 | DOWN | AI733203 |
| 412 | DOWN | AI733226 |
| 413 | DOWN | AI733311 |
| 414 | DOWN | AI733333 |
| 415 | UP | AI733348 |
| 416 | DOWN | AI733440 |
| 417 | DOWN | AI733643 |
| 418 | UP | AI791140 |
| 419 | DOWN | AI820648 |
| 420 | DOWN | T99030 |
| 421 | DOWN | AA005292 |
| 422 | DOWN | AA035344 |
| 423 | DOWN | AA041254 |
| 424 | UP | AA045253 |
| 425 | UP | AA045527 |
| 426 | UP | AA069452 |
| 427 | UP | AA101771 |
| 428 | UP | AA115749 |
| 429 | DOWN | AA136071 |
| 430 | DOWN | AA150107 |
| 431 | DOWN | AA173109 |
| 432 | DOWN | AA194070 |
| 433 | DOWN | AA210707 |
| 434 | DOWN | AA214559 |
| 435 | DOWN | AA251129 |
| 436 | DOWN | AA251363 |
| 437 | UP | AA256073 |
| 438 | UP | AA282292 |
| 439 | UP | AA284067 |
| 440 | UP | AA291138 |
| 441 | UP | AA293192 |
| 442 | DOWN | AA416775 |
| 443 | DOWN | AA417618 |
| 444 | UP | AA421484 |
| 445 | DOWN | AA423977 |
| 446 | DOWN | AA424944 |
| 447 | DOWN | AA426344 |
| 448 | DOWN | AA431761 |
| 449 | DOWN | AA446013 |
| 450 | DOWN | AA446316 |
| 451 | DOWN | AA448192 |
| 452 | UP | AA452807 |
| 453 | DOWN | AA459358 |
| 454 | DOWN | AA461501 |
| 455 | DOWN | AA461534 |
| 456 | DOWN | AA463625 |
| 457 | DOWN | AA479912 |
| 458 | UP | AA481412 |
| 459 | DOWN | AA481492 |
| 460 | DOWN | AA489061 |
| 461 | DOWN | AA489200 |
| 462 | DOWN | AA489218 |
| 463 | DOWN | AA489652 |
| 464 | UP | AA489697 |
| 465 | UP | AA490225 |
| 466 | DOWN | AA490892 |
| 467 | UP | AA491285 |
| 468 | UP | AA496936 |
| 469 | UP | AA504457 |
| 470 | DOWN | AA521339 |
| 471 | DOWN | AA599376 |
| 472 | DOWN | AA600238 |
| 473 | DOWN | AA609215 |
| 474 | DOWN | AA620598 |
| 475 | UP | AA620955 |
| 476 | UP | AA626256 |
| 477 | UP | AA626311 |
| 478 | UP | AA628243 |
| 479 | DOWN | AA629901 |
| 480 | DOWN | AA629903 |
| 481 | DOWN | AA629991 |
| 482 | UP | AA630208 |
| 483 | UP | AA630305 |
| 484 | UP | AA630371 |
| 485 | DOWN | AA644587 |
| 486 | UP | AA663920 |
| 487 | UP | AA668647 |
| 488 | UP | AA670270 |
| 489 | UP | AA676246 |
| 490 | UP | AA676259 |
| 491 | DOWN | AA676713 |
| 492 | UP | AA677246 |
| 493 | DOWN | AA677461 |
| 494 | DOWN | AA677671 |
| 495 | DOWN | AA677798 |
| 496 | DOWN | AA678047 |
| 497 | DOWN | AA680221 |
| 498 | DOWN | AA682248 |
| 499 | DOWN | AA682505 |
| 500 | DOWN | AA693513 |
| 501 | DOWN | AA699850 |
| 502 | DOWN | AA700108 |
| 503 | UP | AA700433 |
| 504 | UP | AA702723 |
| 505 | DOWN | AA704322 |
| 506 | UP | AA704896 |
| 507 | UP | AA704981 |
| 508 | DOWN | AA705306 |
| 509 | DOWN | AA705431 |
| 510 | DOWN | AA706864 |
| 511 | DOWN | AA706966 |
| 512 | DOWN | AA708157 |
| 513 | DOWN | AA732827 |
| 514 | DOWN | AA773037 |
| 515 | DOWN | AA775574 |
| 516 | UP | AA775606 |
| 517 | DOWN | AA776813 |
| 518 | DOWN | AA776828 |
| 519 | UP | AA776844 |
| 520 | DOWN | AA778551 |
| 521 | UP | AA779460 |
| 522 | UP | AA779843 |
| 523 | DOWN | AA779865 |
| 524 | UP | AA780042 |
| 525 | DOWN | AA827297 |
| 526 | DOWN | AA858162 |
| 527 | UP | AA864787 |
| 528 | DOWN | AA872282 |
| 529 | DOWN | AA878939 |
| 530 | DOWN | AA879423 |
| 531 | DOWN | AA883127 |
| 532 | DOWN | AA883353 |
| 533 | UP | AA883755 |
| 534 | DOWN | AA884326 |
| 535 | DOWN | AA884399 |
| 536 | DOWN | AA884412 |
| 537 | DOWN | AA884428 |
| 538 | UP | AA886178 |
| 539 | DOWN | AA886414 |
| 540 | UP | AA886892 |
| 541 | DOWN | AA887525 |
| 542 | DOWN | AA889041 |
| 543 | DOWN | AA890067 |
| 544 | DOWN | AA890098 |
| 545 | DOWN | AA894855 |
| 546 | DOWN | AA904777 |
| 547 | UP | AA905098 |
| 548 | DOWN | AA905113 |
| 549 | DOWN | AA905145 |
| 550 | UP | AA905331 |
| 551 | DOWN | AA905968 |
| 552 | DOWN | AA906209 |
| 553 | UP | AA907727 |
| 554 | DOWN | AA908678 |
| 555 | DOWN | AA909664 |
| 556 | DOWN | AA909688 |
| 557 | DOWN | AA909982 |
| 558 | UP | AA910454 |
| 559 | UP | AA913408 |
| 560 | DOWN | AA917044 |
| 561 | DOWN | AA917854 |
| 562 | UP | AA918191 |
| 563 | DOWN | AA918197 |
| 564 | DOWN | AA919064 |
| 565 | DOWN | AA919087 |
| 566 | DOWN | AA919125 |
| 567 | UP | AA921759 |
| 568 | UP | AA921894 |
| 569 | DOWN | AA922734 |
| 570 | DOWN | AA922858 |
| 571 | UP | AA923375 |
| 572 | DOWN | AA927170 |
| 573 | DOWN | AA927221 |
| 574 | DOWN | AA927646 |
| 575 | DOWN | AA927904 |
| 576 | DOWN | AA928710 |
| 577 | UP | AA933076 |
| 578 | DOWN | AA935909 |
| 579 | DOWN | AA938927 |
| 580 | DOWN | AA939238 |
| 581 | DOWN | AA948144 |
| 582 | UP | AA952874 |
| 583 | DOWN | AA953066 |
| 584 | DOWN | AA954771 |
| 585 | DOWN | AA960970 |
| 586 | DOWN | AA961109 |
| 587 | DOWN | AA962272 |
| 588 | DOWN | AA968436 |
| 589 | DOWN | AA970022 |
| 590 | DOWN | AA970023 |
| 591 | DOWN | AA970083 |
| 592 | DOWN | AA970307 |
| 593 | DOWN | AA970505 |
| 594 | DOWN | AA970843 |
| 595 | UP | AA971014 |
| 596 | DOWN | AA971493 |
| 597 | UP | AA972930 |
| 598 | DOWN | AA973496 |
| 599 | UP | AA973750 |
| 600 | DOWN | AA975103 |
| 601 | DOWN | AA975413 |
| 602 | UP | AA975507 |
| 603 | DOWN | AA976049 |
| 604 | UP | AA976649 |
| 605 | DOWN | AA977487 |
| 606 | DOWN | AA977598 |
| 607 | DOWN | AA977618 |
| 608 | DOWN | AA983875 |
| 609 | DOWN | AA984678 |
| 610 | DOWN | AA984894 |
| 611 | DOWN | AA987928 |
| 612 | DOWN | AA988036 |
| 613 | DOWN | AA989432 |
| 614 | DOWN | AA991912 |
| 615 | DOWN | AA993923 |
| 616 | DOWN | AA993948 |
| 617 | UP | AA993998 |
| 618 | UP | AA994520 |
| 619 | DOWN | AA994735 |
| 620 | DOWN | AI003528 |
| 621 | DOWN | AI004001 |
| 622 | UP | AI005126 |
| 623 | UP | AI005270 |
| 624 | DOWN | AI005275 |
| 625 | DOWN | AI015751 |
| 626 | UP | AI015890 |
| 627 | DOWN | AI016090 |
| 628 | DOWN | AI017618 |
| 629 | DOWN | AI024808 |
| 630 | DOWN | AI025349 |
| 631 | UP | AI028328 |
| 632 | UP | AI028395 |
| 633 | UP | AI033510 |
| 634 | UP | AI079530 |
| 635 | UP | AI091505 |
| 636 | UP | AI126052 |
| 637 | UP | AI126464 |
| 638 | UP | AI127087 |
| 639 | DOWN | AI141063 |
| 640 | DOWN | AI146610 |
| 641 | DOWN | AI147867 |
| 642 | UP | AI151218 |
| 643 | UP | AI183541 |
| 644 | UP | AI184207 |
| 645 | UP | AI190157 |
| 646 | DOWN | AI190728 |
| 647 | UP | AI198877 |
| 648 | UP | AI204175 |
| 649 | UP | AI204532 |
| 650 | UP | AI204957 |
| 651 | UP | AI207146 |
| 652 | UP | AI214272 |
| 653 | UP | AI216627 |
| 654 | UP | AI217765 |
| 655 | UP | AI219651 |
| 656 | UP | AI224908 |
| 657 | UP | AI239760 |
| 658 | UP | AI242117 |
| 659 | UP | AI242356 |
| 660 | UP | AI243374 |
| 661 | UP | AI243608 |
| 662 | UP | AI243663 |
| 663 | UP | AI247218 |
| 664 | UP | AI271617 |
| 665 | DOWN | AI272678 |
| 666 | UP | AI276564 |
| 667 | UP | AI279626 |
| 668 | UP | AI280437 |
| 669 | UP | AI286198 |
| 670 | UP | AI291262 |
| 671 | UP | AI298267 |
| 672 | UP | AI301973 |
| 673 | UP | AI309066 |
| 674 | UP | AI312671 |
| 675 | UP | AI347570 |
| 676 | UP | AI347657 |
| 677 | UP | AI349468 |
| 678 | DOWN | AI360323 |
| 679 | UP | H04313 |
| 680 | UP | H05970 |
| 681 | UP | H08785 |
| 682 | DOWN | H10641 |
| 683 | DOWN | H11658 |
| 684 | DOWN | H15452 |
| 685 | UP | H15559 |
| 686 | DOWN | H16238 |
| 687 | DOWN | H17800 |
| 688 | DOWN | H43101 |
| 689 | UP | H46966 |
| 690 | DOWN | H47121 |
| 691 | DOWN | H52198 |
| 692 | DOWN | H52531 |
| 693 | UP | H52546 |
| 694 | UP | H54253 |
| 695 | DOWN | H57947 |
| 696 | DOWN | H60408 |
| 697 | UP | H63248 |
| 698 | DOWN | H70895 |
| 699 | DOWN | H72866 |
| 700 | DOWN | H81000 |
| 701 | DOWN | H85107 |
| 702 | DOWN | H88540 |
| 703 | UP | H91700 |
| 704 | UP | H97413 |
| 705 | UP | H97987 |
| 706 | UP | N20862 |
| 707 | DOWN | N21630 |
| 708 | UP | N22796 |
| 709 | DOWN | N23897 |
| 710 | DOWN | N25338 |
| 711 | UP | N33229 |
| 712 | UP | N33555 |
| 713 | DOWN | N35046 |
| 714 | DOWN | N48689 |
| 715 | DOWN | N49276 |
| 716 | UP | N51336 |
| 717 | UP | N52627 |
| 718 | DOWN | N54855 |
| 719 | UP | N54899 |
| 720 | UP | N56860 |
| 721 | UP | N57955 |
| 722 | UP | N58081 |
| 723 | UP | N58543 |
| 724 | DOWN | N62378 |
| 725 | DOWN | N62404 |
| 726 | DOWN | N63490 |
| 727 | UP | N63906 |
| 728 | DOWN | N66102 |
| 729 | DOWN | N66104 |
| 730 | DOWN | N73278 |
| 731 | UP | N77929 |
| 732 | UP | N90849 |
| 733 | DOWN | R00311 |
| 734 | DOWN | R02083 |
| 735 | UP | R08356 |
| 736 | DOWN | R11341 |
| 737 | UP | R15104 |
| 738 | DOWN | R15891 |
| 739 | DOWN | R15979 |
| 740 | UP | R20625 |
| 741 | UP | R20640 |
| 742 | DOWN | R31272 |
| 743 | DOWN | R33616 |
| 744 | DOWN | R37780 |
| 745 | UP | R38660 |
| 746 | UP | R39951 |
| 747 | UP | R40123 |
| 748 | UP | R43555 |
| 749 | UP | R51627 |
| 750 | UP | R52531 |
| 751 | DOWN | R52541 |
| 752 | DOWN | R52650 |
| 753 | UP | R53235 |
| 754 | UP | R55784 |
| 755 | DOWN | R59072 |
| 756 | DOWN | R68794 |
| 757 | DOWN | R70402 |
| 758 | UP | R73637 |
| 759 | UP | R74206 |
| 760 | DOWN | R77434 |
| 761 | UP | R79952 |
| 762 | UP | R80259 |
| 763 | UP | R83878 |
| 764 | DOWN | R87758 |
| 765 | UP | R98791 |
| 766 | DOWN | R99110 |
| 767 | UP | T54672 |
| 768 | DOWN | T57803 |
| 769 | UP | T67181 |
| 770 | DOWN | T71889 |
| 771 | UP | T77897 |
| 772 | UP | T78450 |
| 773 | UP | T90962 |
| 774 | DOWN | T96375 |
| 775 | DOWN | T98542 |
| 776 | DOWN | T98927 |
| 777 | DOWN | T99029 |
| 778 | DOWN | W67951 |
| 779 | DOWN | W73883 |
| 780 | DOWN | W81432 |
| 781 | DOWN | W90624 |
| 782 | DOWN | W90749 |
| 783 | DOWN | W95876 |

[0131] TABLE 4
Most relevant gene transcripts

| SEQ ID NO | vailD | Accession | Refseq | Description |
|---|---|---|---|---|
| 378 | 25977 | AA903175 | NM_007360.1 | Homo sapiens killer cell lectin-like receptor subfamily K, member 1 (KLRK1), mRNA |
| 203 | 8411 | AA419251 | NM_003641 | Homo sapiens interferon induced transmembrane protein 1 (9-27) (IFITM1), mRNA |
| 448 | 13294 | AA431761 | NM_153051 | Homo sapiens myotubularin related protein 3 (MTMR3) transcript variant 2, mRNA |
| 352 | 9521 | R55763 | NM_020819 | Homo sapiens KIAA1411 (KIAA1411), mRNA |
| 576 | 33041 | AA928710 | | |
| 73 | 31521 | AI364359 | NM_007129.2 | Homo sapiens Zic family member 2 (odd-paired homolog, Drosophila) (ZIC2), mRNA |
| 759 | 13909 | R74206 | NM_080664 | Homo sapiens chromosome 14 open reading frame 126 (C14orf126), mRNA |
| 55 | 25057 | AA862473 | NM_020372.2 | Homo sapiens solute carrier family 22 (organic cation transporter), member 71 |
| | | | | (SLC22A17), transcript variant 1, mRNA |
| 94 | 28272 | R49756 | NM_003471.2 | Homo sapiens potassium voltage-gated channel, shaker-related subfamily, beta member 1 |
| | | | | (KCNAB1), transcript variant 2, mRNA |
| 162 | 31915 | AI671599 | NM_002556.2 | Homo sapiens oxysterol binding protein (OSBP), mRNA |
| 284 | 7647 | W32509 | NM_012121 | Homo sapiens CDC42 effector protein (Rho GTPase binding) 4 (CDC42EP4), mRNA |
| 108 | 5618 | N51651 | NM_015099 | Homo sapiens calmodulin binding transcription activator 2 (CAMTA2), mRNA |
| 52 | 11452 | AA446864 | NM_019000 | Homo sapiens hypothetical protein FLJ20152 (FLJ20152), mRNA |
| 155 | 17242 | AA703250 | NM_004697 | Homo sapiens PRP4 pre-mRNA processing factor 4 homolog (yeast) (PRPF4), mRNA |
| 150 | 39841 | AI203283 | NM_032726.2 | Homo sapiens phospholipase C, delta 4 (PLCD4), mRNA |
| 177 | 12032 | N35020 | NM_016422 | Homo sapiens ring finger protein 141 (RNF141), mRNA |
| 309 | 25587 | AA904604 | XM_096472.2 | PREDICTED: Homo sapiens similar to RIKEN cDNA 1700029I15 (LOC143678), mRNA |
| 601 | 26407 | AA975413 | | |
| 751 | 30082 | R52541 | | |
| 596 | 26696 | AA971493 | | |
| 156 | 18958 | N48345 | NM_173680 | Homo sapiens hypothetical protein MGC33584 (MGC33584), mRNA |
| 764 | 23764 | R87758 | | |
| 128 | 15927 | AA463461 | NM_024325 | Homo sapiens zinc finger protein 343 (ZNF343), mRNA |
| 704 | 32026 | H97413 | | |
| 663 | 38458 | AI247218 | | |
| 706 | 11108 | N20862 | NM_025133 | Homo sapiens F-box protein 11 (FBXO11), transcript variant 1, mRNA |
| 630 | 29950 | AI025349 | | |
| 101 | 16379 | R40567 | NM_004229 | Homo sapiens cofactor required for Sp1 transcriptional activation, subunit 2, 150 kDa |
| | | | | (CRSP2), mRNA |
| 123 | 5128 | N63635 | NM_002648 | Homo sapiens pim-1 oncogene (PIM1), mRNA |
| 429 | 12839 | AA136071 | NR_001569 | Homo sapiens a disintegrin and metalloproteinase domain 3a (cyritestin 1) (ADAM3A) on |
| | | | | chromosome 8 |
| 364 | 5756 | AA148683 | NM_001002860 | Homo sapiens BTB (POZ) domain containing 7 (BTBD7), transcript variant 1, mRNA |
| 100 | 20964 | AA780712 | NM_003588.2 | Homo sapiens cullin 4B (CUL4B), mRNA |
| 103 | 19816 | AA706969 | NM_017893 | Homo sapiens sema domain, immunoglobulin domain (Ig), transmembrane domain (TM) |
| | | | | and short cytoplasmic domain, (semaphorin) 4G (SEMA4G), mRNA |
| 315 | 13279 | AA429886 | XM_370965 | PREDICTED: Homo sapiens similar to hypothetical protein BC011981 (LOC388242), |
| | | | | mRNA |
| 259 | 7080 | AA055163 | NM_001232 | Homo sapiens calsequestrin 2 (cardiac muscle) (CASQ2), mRNA |
| 733 | 14265 | R00311 | XM_117117 | PREDICTED: Homo sapiens hypothetical gene FLJ13072 (FLJ13072), mRNA |
| 697 | 30308 | H63248 | | |
| 744 | 16786 | R37780 | NM_018133 | Homo sapiens ring finger protein 184 (RNF184), mRNA |
| 369 | 20594 | AA489033 | NM_001009894.2 | Homo sapiens hypothetical protein DKFZp434N2030 (DKFZp434N2030), mRNA |
| 765 | 28959 | R98791 | | |
| 423 | 7868 | AA041254 | NM_152417 | Homo sapiens hypothetical protein FLJ32370 (FLJ32370), mRNA |
| 130 | 31418 | AI276745 | NM_000956.2 | Homo sapiens prostaglandin E receptor 2 (subtype EP2), 53 kDa (PTGER2), mRNA |
| 673 | 39557 | AI309066 | | |
| 503 | 24470 | AA700433 | | |
| 553 | 25631 | AA907727 | | |
| 282 | 8423 | AA044390 | NM_001001521 | Homo sapiens UDP-glucose pyrophosphorylase 2 (UGP2), transcript variant 2, mRNA |
| 98 | 14686 | AA127221 | NM_003856 | Homo sapiens interleukin 1 receptor-like 1 (IL1RL1), transcript variant 2, mRNA |
| 741 | 23625 | R20640 | | |
| 534 | 25227 | AA884326 | | |
| 165 | 31449 | AI300766 | NM_003989.2 | Homo sapiens paired box gene 2 (PAX2), transcript variant d, mRNA |
| 637 | 36066 | AI126464 | | |
| 470 | 17370 | AA521339 | NM_002547 | Homo sapiens oligophrenin 1 (OPHN1), mRNA |
| 776 | 29018 | T98927 | | |
| 707 | 30502 | N21630 | | |
| 560 | 33241 | AA917044 | | |
| 709 | 29342 | N23897 | | |
| 572 | 25667 | AA927170 | | |
| 257 | 25006 | AA826373 | NM_205842.1 | Homo sapiens NCK-associated protein 1 (NCKAP1), transcript variant 2, mRNA |
| 229 | 21895 | AA670305 | XM_117294.6 | PREDICTED: Homo sapiens hypothetical protein LOC200933 (LOC200933), mRNA |
| 440 | 20742 | AA291138 | | |
| 373 | 22475 | AA703019 | NM_016530.2 | Homo sapiens RAB8B, member RAS oncogene family (RAB8B), mRNA |
| 763 | 36396 | R83878 | | |
| 235 | 20102 | AA626335 | NM_014567.2 | Homo sapiens breast cancer anti-estrogen resistance 1 (BCAR1), mRNA |
| 246 | 1455 | T70056 | NM_002940 | Homo sapiens ATP-binding cassette, sub-family E (OABP), member 1 (ABCE1), mRNA |
| 642 | 35753 | AI151218 | | |
| 42 | 9245 | AA291513 | NM_001707 | Homo sapiens B-cell CLL/lymphoma 7B (BCL7B), transcript variant 1, mRNA |
| 531 | 25235 | AA883127 | | |
| 86 | 16950 | AA916325 | NM_003739 | Homo sapiens aldo-keto reductase family 1, member C3 (3-alpha hydroxysteroid |
| | | | | dehydrogenase, type II) (AKR1C3), mRNA |
| 687 | 9560 | H17800 | NM_052857 | Homo sapiens coiled-coil domain containing 16 (CCDC16), mRNA |
| 683 | 5098 | H11658 | NM_012120 | Homo sapiens CD2-associated protein (CD2AP), mRNA |
| 669 | 38215 | AI286198 | | |
| 84 | 20085 | AA634427 | NM_018405.2 | Homo sapiens hypothetical protein, clone 2746033 (HSA272196), mRNA |
| 716 | 19053 | N51336 | NM_001004341 | Homo sapiens FLJ16478 protein (FLJ16478), mRNA |
| 297 | 21091 | AI014441 | NM_001003397.1 | Homo sapiens tumor protein D52-like 1 (TPD52L1), transcript variant 4, mRNA |
| 278 | 71 | AA479196 | NM_004128 | Homo sapiens general transcription factor IIF, polypeptide 2 (30 kD subunit) (GTF2F2), |
| | | | | mRNA |
| 17 | 27256 | AI017101 | NM_015001.2 | Homo sapiens spen homolog, transcriptional regulator (Drosophila) (SPEN), mRNA |
| 441 | 2221 | AA293192 | NM_002161 | Homo sapiens isoleucine-tRNA synthetase (IARS), transcript variant short, mRNA |
| 593 | 33594 | AA970505 | | |
| 473 | 23225 | AA609215 | | |
| 45 | 12056 | AA598780 | NM_014776 | Homo sapiens G protein-coupled receptor kinase interactor 2 (GIT2), transcript variant 3, |
| | | | | mRNA |
| 766 | 23801 | R99110 | | |
| 465 | 20810 | AA490225 | | |
| 221 | 15286 | AA479950 | NM_198531 | Homo sapiens ATPase, Class II, type 9B (ATP9B), mRNA |
| 181 | 1160 | AA454819 | NM_002746 | Homo sapiens mitogen-activated protein kinase 3 (MAPK3), mRNA |
| 573 | 26215 | AA927221 | | |
| 782 | 5759 | W90749 | NM_203372 | Homo sapiens acyl-CoA synthetase long-chain family member 3 (ACSL3), transcript |
| | | | | variant 2, mRNA |
| 779 | 12500 | W73883 | NM_016065 | Homo sapiens mitochondrial ribosomal protein S16 (MRPS16), nuclear gene encoding |
| | | | | mitochondrial protein, mRNA |
| 617 | 27321 | AA993998 | | |
| 387 | 1847 | AA487265 | NM_014752 | Homo sapiens signal peptidase complex subunit 2 homolog (S. cerevisiae) (SPCS2), |
| | | | | mRNA |
| 466 | 20571 | AA490892 | | |
| 167 | 32174 | AA101088 | NM_017846.3 | Homo sapiens tRNA selenocysteine associated protein (SECP43), mRNA |
| 262 | 8370 | N63943 | NM_000239 | Homo sapiens lysozyme (renal amyloidosis) (LYZ), mRNA |
| 197 | 21010 | AA903500 | NM_021809.4 | Homo sapiens TGFB-induced factor 2 (TALE family homeobox) (TGIF2), mRNA |
| 294 | 9556 | H23444 | NM_213609 | Homo sapiens family with sequence similarity 19 (chemokine (C-C motif)-like), |
| | | | | member A1 (FAM19A1), mRNA |
| 375 | 16510 | R51015 | NM_000369 | Homo sapiens thyroid stimulating hormone receptor (TSHR), transcript variant 1, mRNA |
| 175 | 17327 | AA670408 | NM_004048 | Homo sapiens beta-2-microglobulin (B2M), mRNA |
| 4 | 15278 | AA398356 | NM_020645 | Homo sapiens nuclear receptor interacting protein 3 (NRIP3), mRNA |
| 60 | 31846 | AI681015 | NM_004232.2 | Homo sapiens suppressor of cytokine signaling 6 (SOCS6), mRNA |
| 251 | 2910 | N55274 | NM_003239 | Homo sapiens transforming growth factor, beta 3 (TGFB3), mRNA |

### EXAMPLE 2

### Determination of Protein Levels in Blood

[0132] Among the biomarker's genes that are expressed differentially in asthma and non-asthma patients (namely, gene transcripts that constitute the “final asthma gene expression profile”), there are genes that encode known proteins. These known proteins are either secreted into the blood, localized intracellularly or localized in the cell membrane as transmembrane proteins (see Table 5). Detection of the proteins can be performed by protein detection methods known in the art such as methods based on antigen-antibody reactions including, but not limited to, enzyme-linked immunosorbent assay (ELISA), western blotting, protein arrays, antibody based biosensors, or by protein analysis methods such as mass spectrometry.

[0133] Thus, proteins encoded by gene transcripts that are identified as biomarkers, can be quantified in blood samples or in isolated blood cells by different protein detection methods, and hence their detection can enable diagnosis, prognosis and monitoring of the disease.

TABLE 5
Examples of genes with extra or intracellular known localization.

| SEQ. ID | | | | |
|---|---|---|---|---|
| NO. | Localiztion | Accession | Description | Regulation |
| 294 | Secreted | NM_213609 | FAM19A1 family with sequence | Down |
| | | | similarity 19 (chemokine (C-C | |
| | | | motif)-like), member A1 | |
| 251 | Secreted | NM_003239 | TGFB3 transforming growth factor, | UP |
| | | | beta 3 | |
| 175 | secreted | NM_004048 | B2M beta-2-microglobulin | UP |
| 203 | Transmembrane | NM_003641 | IFITM1 interferon induced | Down |
| | | | transmembrane protein 1 (9-27) | |
| 375 | Transmembrane | NM_000369 | TSHR thyroid stimulating hormone | UP |
| | | | receptor | |
| 94 | Transmembrane | NM_003471 | KCNAB1 potassium voltage-gated | UP |
| | | | channel, shaker-related subfamily, | |
| | | | beta member 1 | |
| 197 | Cellular | NM_021809 | TGIF2 TGFB-induced factor 2 | UP |
| | | | (TALE family homeobox) | |
| 4 | Cellular | NM_020645 | NRIP3 nuclear receptor interacting | UP |
| | | | protein 3 | |
| 60 | Cellular | NM_004232 | SOCS6 suppressor of cytokine | UP |
| | | | signaling 6 | |

[0134] It will be appreciated by persons skilled in the art that the present invention is not limited by what has been particularly shown and described herein above. Rather the scope of the invention is defined by the claims that follow.

What is claimed is:

1. A method of identifying at least one biomarker for a disease comprising the steps of:
a) determining the level of at least one gene transcript in a subpopulation of blood cells obtained from at least one subject having the disease, the at least one subject having the disease being a member of a closed population; and
b) comparing the level of the at least one gene transcript from step a) with the level of said at least one gene transcript in the subpopulation of blood cells obtained from at least one subject not having the disease, the at least one subject not having the disease being a member of the closed population, wherein a gene transcript which displays differing levels in the comparison of step b) is identified as being a biomarker for said disease.

2. The method according to claim 1 further comprising the step of:
c) determining the level of the at least one gene transcript in said subpopulation of blood cells obtained from at least one subject having the disease, the at least one subject having the disease being a member of an open population; and
d) comparing the level of the at least one gene transcript from step c) with the level of said at least one gene transcript in the subpopulation of blood cells obtained from at least one subject not having the disease, the at least one subject not having the disease being a member of an open population, wherein a gene transcript which displays corresponding changes in levels of gene expression in the comparisons of steps b) and d) is identified as being a biomarker for said disease.

3. The method according to claim 2, wherein the corresponding changes in levels of gene expression are increasing levels.

4. The method according to claim 2, wherein the corresponding changes in levels of gene expression are decreasing levels.

5. The method according to claim 1, wherein the at least one biomarker is a plurality of biomarkers.

6. The method according to claim 5, wherein the plurality of biomarkers comprises at least 100 biomarkers.

7. The method according to claim 5, wherein the plurality of biomarkers comprises at least 500 biomarkers.

8. The method according to claim 1, wherein the subpopulation of blood cells is peripheral white blood cells.

9. The method according to claim 8, wherein the subpopulation of blood cells is selected from the group consisting of monocytes, lymphocytes, neutrophils, eosinophils, and basophils.

10. The method according to claim 1, wherein the disease is selected from the group consisting of cardiovascular disorders, immune diseases, muscular diseases, mood diseases, autoimmune diseases, respiratory diseases, endocrine disorders, neurological disorders, metabolic disorders and cellular proliferative disorders.

11. The method according to claim 10, wherein the respiratory disease is asthma.

12. The method according to claim 11, wherein the biomarker is selected from the group consisting of SEQ ID NOs: 1-783 and complements thereof.

13. The method according to claim 1, wherein the step of determining the level of at least one gene transcript comprises microarray hybridization.

14. The method according to claim 13, wherein the microarray hybridization comprises hybridizing a first plurality of isolated nucleic acid molecules to an array comprising a second plurality of isolated nucleic acid molecules.

15. The method according to claim 14, wherein the first plurality of isolated nucleic acid molecules is selected from the group consisting of RNA, DNA, cDNA, and PCR products.

16. The method according to claim 14, wherein the second plurality of isolated nucleic acid molecules is selected from the group consisting of RNA, DNA, cDNA, PCR products, oligonucleotides and ESTs.

17. The method according to claim 14, wherein the array comprises one or more of the identified biomarkers.

18. The method according to claim 14, wherein the array comprises a plurality of isolated nucleic acid molecules corresponding to one or more of the identified biomarkers or complements thereof.

19. A method of diagnosing, monitoring or prognosing a disease in a subject comprising the steps of:
a) determining the level of at least one gene transcript in a subpopulation of blood cells obtained from the subject, wherein the at least one gene transcript corresponds to a biomarker, the biomarker having been determined according to claim 1; and
b) comparing the level of said at least one gene transcript of step a) with the level of said at least one gene transcript in a reference gene transcript profile, thereby determining the status of the disease in said subject.

20. The method according to claim 19, wherein the step of determining the level of the at least one gene transcript comprises determining the expression level of the gene.

21. The method according to claim 19, wherein the step of determining the level of the at least one gene transcript comprises determining the level of the polypeptide gene transcript.

22. The method according to claim 19, wherein the subpopulation of blood cells is peripheral white blood cells.

23. The method according to claim 22, wherein the subpopulation of blood cells is selected from the group consisting of lymphocytes, monocytes, neutrophils, eosinophils and basophils.

24. The method according to claim 19, wherein the biomarker is a plurality of biomarkers.

25. The method according to claim 19, wherein the disease is selected from the group consisting of cardiovascular disorders, immune diseases, muscular diseases, mood disorders, autoimmune diseases, respiratory diseases, endocrine disorders, neurological disorders, metabolic disorders and cellular proliferative disorders.

26. The method according to claim 25, wherein the respiratory disease is asthma.

27. The method according to claim 26, wherein the biomarkers are selected from the group consisting of SEQ ID NOs: 1-783 and complements thereof.

28. The method according to claim 19, wherein the step of determining the level of at least one gene transcript comprises microarray hybridization.

29. The method according to claim 28, wherein the microarray hybridization comprises hybridizing a first plurality of isolated nucleic acid molecules to an array comprising a second plurality of isolated nucleic acid molecules.

30. The method according to claim 29, wherein the first plurality of isolated nucleic acid molecules is selected from the group consisting of RNA, DNA, cDNA and PCR products.

31. The method according to claim 19, wherein the second plurality of isolated nucleic acid molecules is selected from the group consisting of RNA, DNA, cDNA, PCR products, oligonucleotides and ESTs.

32. The method according to claim 19, wherein the array comprises one or more of the identified biomarkers.

33. The method according to claim 19, wherein the array comprises a plurality of isolated nucleic acid molecules corresponding to one or more of the identified biomarkers or complements thereof.

34. A plurality of isolated nucleic acid molecules corresponding to one or more biomarkers or complements thereof, the biomarkers having been identified according to claim 1.

35. The plurality of isolated nucleic acid molecules according to claim 34, wherein the biomarkers being biomarkers for asthma.

36. The plurality of isolated nucleic acid molecules according to claim 35, wherein the biomarkers of asthma are selected from the group consisting of SEQ ID NOs:1-783 or complements thereof.

37. An array comprising the plurality of isolated nucleic acid molecules according to claim 34.

The application's sequence listing, which the Patent Office published only in electronic form, follows.

SEQUENCE LISTING (783 sequences)

SEQ ID NO: 1 - DNA, 2215 bp, Homo Sapiens
atgggatgtactctgagcgcagaggagagagccgccctcgagcggagcaaggcgattgagaaaaacctcaaagaggatggcatcagcgccgccaaagacgtgaaattactcctgctcggggctggagaatcaggaaaaagcaccattgtgaagcagatgaagatcatccatgaagatggcttctccggagaagacgtgaaacagtacaagcctgttgtctacagcaacactatccagtccctggcagccatcgtccgggccatggacactttgggcatcgaatatggtgataaggagagaaaggctgacgccaagatggtgtgtgatgtggtgagtcggatggaagacaccgagcccttctctgcagagctgctttctgccatgatgcggctctggggcgactcaggaatccaagagtgcttcaaccggtcccgggagtatcaactcaacgactctgccaaatactacctggacagcctggatcggattggggccgccgactaccagcccactgagcaggacatcctccgaaccagggtcaaaaccactggcatcgtagaaacccacttcacattcaagaacctccacttcaggctgtttgacgtcggaggccagcgatctgaacgcaagaagtggatccattgcttcgaggacgtcacggccatcattttctgtgtcgcgctcagcggctatgaccaggtgctccacgaagacgaaaccacgaaccgcatgcacgagtctctcatgctcttcgactccatctgtaacaacaagttcttcatcgatacctccatcattctcttcctcaacaagaaagatctctttggcgagaagatcaagaagtcacctttgaccatctgctttcctgaatacacaggccccaatacctatgaagacgcagccgcctacatccaagcacaatttgaaagcaaaaaccgctcacccaacaaagaaatatattgtcacatgacttgtgccacagacacgaataacatccaggtggtgttcgacgccgtcaccgacatcatcattgccaacaacctccggggctgcggcttgtactgacctcttgtcctgtatagcaacctattttgactgcttcacggactctttgctgttgacgttgatctcctggtagcatgaccttttggcctttgtaagacacacagcctttctgtatcaagcccctgtctaacctacgaccccagagtgactgacggctgtgtatttctgtagaatgctgtagaatccggttttagttgagtcttcacatttagaatttgaaaggaaaaacagaacatttctcatgtgctttgtagcttaaaaaaaggaaaactcaccatttcaaccatatttctttttcttgcaaaacaaacatacccatctgcaccgacgcctgccccgtcccacctcgcgcgagcccctggagctcctgctgggggaggcccatctgccgcctggggctccggtgcggtgcatggtccgaggagtgtgctcaggccgggctttccagaaggcacaggccactgcaaaccctgctgctgccggccgcccagacaccacagacgccactggcggccctaagccactcccgccacacgctcactccaggttcgtatagaaaaagcacagctctcactggccagtagctgccaaaaagaacacccatcgtataaggaaatccagccccatagaaaacaatctgcccaccgaccccctttctaaggatagcctttgtaggggttttttggttcctttttttttttttcagtttgtgtttttacttttgtcccgccgagtactatgtattaccagcccccacccacagatcagtttcctagtctttgggaaacgggttgtgttttttttcctttgccgtgttggatttccggtcgcggctgacacctcccttcgtgtgtgcgcccctccccacccctgcctgtgttctgtgccctgtgtccgctctctcatgtggggatgtttgtgctgcagacaaaaagaacaaaaaaaaatttttaaataccacaagatggaaaaaaaaaacaaaaaaatttaaaaagatggaatgtagtgtttacattaaagccgccgttttcatgaccaatcctatgtcatttctactttgactaatacccaaaccctaaacctcttcacggtttcacttttaagacttaatctgtgctgaagaagaccagtcacagccatttcaaataaa

SEQ ID NO: 2 - DNA, 9517 bp, Homo Sapiens
gttgctgtcggagagagaaagccgcacccgagaggaggtgtgggtgttccgcttccatcctaacggaacgagctccctcttcgcggacatgggattacccagcggctgctaacccctctcctcgccctgctcccccaaaccggcgtggctccccgggcaccaaggagctgactacagaggagcaggatttgcacccctcgctgggcttgctttggcaacagagtgcctgacccaggtcaggattttcaagaaagacatgtctgacaaaatgtctagcttcctacatattggagacatttgttctctgtacgcggagggatcgacaaatggatttattagcaccttgggcctggttgatgatcgttgtgttgtacagccagaaaccggggaccttaacaatccacctaagaaattcagagactgcctctttaagctatgtcccatgaaccgctactctgcccaaaagcagttctggaaagccgctaagcctggggccaacagcaccacagacgcagtgctactcaacaaactgcaccacgctgcagacttggaaaagaagcagaatgagacagaaaacaggaaattgctggggaccgtaatccagtatggcaatgtgatccagctcctgcatttgaaaagtaataaatacctaacagtgaataagaggcttcctgctctgttggagaagaatgccatgagagtcacattggacgaggctggaaatgaagggtcctggttttatattcagccattctacaagctgcgatccattggagacagcgtggtcataggtgacaaggtggttctgaaccccgtcaatgctggtcagcccctacatgctagcagccatcaactggtagataacccaggctgcaatgaggtcaattccgtcaactgcaatacaagctggaaaatagtccttttcatgaaatggagtgataacaaagacgacatattaaaggggggtgacgtggtgaggctgtttcatgctgagcaggagaagtttctcacctgtgacgaacacaggaagaagcagcacgtcttcctgagaaccacgggccggcagtcggccacatctgccaccagttcaaaagccctgtgggaggtggaggtggtccagcatgacccatgtcggggcggagcagggtattggaacagccttttccgtttcaagcatctggccacggggcattacttggcagcagaggtggaccctgatcaggacgcctctcgaagtaggttgcggaatgcccaagaaaagatggtatactccctggtctctgtgcctgaaggcaatgacatctcctccattttcgagctagatcccaccactctgcgtggaggtgacagccttgtcccaaggaactcttatgttcggctcagacacctatgtactaatacctgggttcacagcacaaatattcctattgacaaggaagaagaaaagcccgtgatgctgaaaattggcacctctcctgtgaaggaggataaggaagcatttgccatagttccggtttctcctgctgaagttcgggacctggactttgccaatgatgccagcaaggtgctgggctccattgctgggaagctagagaagggcaccatcacccagaatgaaaggaggtctgtaaccaagctgctagaagatttggtttacttcgtcactggtggaactaattctggtcaagatgttctcgaagttgtcttctccaagcccaacagagaacggcagaaactgatgagagaacagaatattctcaagcagatcttcaagttgttacaagccccattcacagactgcggtgatggcccaatgcttcggctggaagagctcggggaccagcggcacgctcctttcagacacatctgccggctctgctacagggtgctgagacactcgcagcaagactacaggaagaaccaggagtatatagccaagcagtttggcttcatgcagaagcagattggctatgatgtgttggctgaagacactatcactgccctgctccacaataatcggaaactcctggaaaaacacattaccgcggcagagattgacacatttgtcagcctggtgcgaaagaacagggagcccagattcttagattacctctccgacctctgtgtctccatgaacaaatcaattccagtgacccaggaactgatatgtaaagctgtgctgaaccccaccaacgctgacatcctgattgagaccaaattggttctttctcgttttgaatttgaaggtgtctcttccactggagagaatgctctggaggcaggagaagacgaggaagaggtgtggctgttttggagggacagcaacaaagagattcgcagcaagagtgtgagggaattggctcaggatgctaaagaagggcagaaggaggaccgagacgttctcagctactacagatatcagctgaacctctttgcgaggatgtgtctggaccgccaatacctggccatcaacgaaatctcaggccagctggatgtcgatctcattctccgctgcatgtctgacgagaacctgccctatgacctcagggcgtccttctgccgcctcatgcttcacatgcatgtggaccgagatccccaggaacaagtcacccccgtgaaatatgcccgcctctggtcggagattccctcggagatcgccattgacgactatgatagtagtggagcttccaaagatgaaattaaggagagatttgctcagaccatggagtttgtggaggagtatttaagagatgtggtttgtcagaggttccctttctctgataaagagaagaataagcttacgtttgaggttgtaaatttagctaggaatctcatatactttggtttctacaacttctctgaccttctccgattaactaagatccttctggccatattggactgtgtacatgtgacaacaatcttccccattagcaagatggcgaaaggagaagagaataaaggcagtaacgtgatgagatctattcatggcgtgggagagctgatgacccaggtggtgctccggggaggaggctttttgcccatgactcccatggctgctgcccctgaaggcaatgtgaagcaggcagagcctgagaaggaggacatcatggtcatggacaccaagctgaagatcattgagatactccagtttattttgaatgtgaggttggattataggatctcctgcctcctgtgtatatttaagcgagagtttgatgaaagcaattcccagacttcagaaacatcctccggaaacagcagccaagaagggccaagtaatgtaccaggtgctcttgactttgaacacattgaagaacaagcagaaggcatctttggaggaagtgaggagaacaccccactggacttggatgaccacggcggcagaacctttctccgtgtcctgctccacttgacgatgcatgactacccacccctggtgtcaggggccctgcagctcctcttccggcacttcagccagaggcaggaggtgctccaggccttcaaacaggttcaactgctggttaccagccaagatgtggacaactacaaacagatcaaacaagacttggatcaactgaggtccatcgtggaaaagtcagagctttgggtgtacaaagggcagggccccgatgagactatggatggtgcatctggagaaaatgaacataagaaaacggaggagggaaataacaagccacaaaagcatgaaagcaccagcagctacaactacagagtggtcaaagagattttgattcggcttagcaaactctgtgttcaagagagtgcctcagtgagaaagagcaggaagcagcaacagcgtctgctccggaacatgggcgcgcacgccgtggtgctggagctgctgcagattccctatgagaaggccgaagataccaagatgcaagagataatgaggttggctcatgaatttttgcagaatttctgcgcaggcaaccagcagaatcaagctttgctacataaacacataaacctgtttctcaacccagggatcctggaggcagtaaccatgcagcacatcttcatgaacaatttccagctttgcagtgagatcaacgagagagttgttcagcacttcgttcactgcatagagactcacggtcggaatgtccagtatataaagttcttacagacaattgtcaaggcagaagggaaatttattaaaaaatgccaagacatggttatggccgagctggtcaattcgggagaggatgtcctcgtgttctacaacgacagagcctctttccagactctgatccagatgatgcggtcagaacgggatcggatggatgagaacagccctctcatgtaccacatccacttggtcgagctcctggctgtgtgcacggagggtaagaatgtctacacagagatcaagtgcaactccctgctcccgctggatgacatcgttcgcgtggtgacccacgaggactgcatccctgaggttaaaattgcatacattaacttcctgaatcactgctatgtggatacagaggtggaaatgaaggagatttataccagcaatcacatgtggaaattgtttgagaatttccttgtagacatctgcagggcctgtaacaacactagtgacaggaaacatgcagactcgattttggagaagtatgtcaccgaaatcgtcatgagtattgttactactttcttcagctctcccttctcagaccagagtacgactttgcagactcgccagcctgtctttgtgcaactgctgcaaggcgtgttcagggtttaccactgcaactggttaatgccaagccaaaaagcctccgtggagagctgtattcgggtgctgtctgatgtagccaagagccgggccattgccattcccgtggacctggacagccaagtcaacaacctctttctcaagtcccacagcattgtgcagaaaacagccatgaactggcggctctcagcccgcaatgccgcacgcagggactctgttctggcagcttccagagactaccggaatatcattgagagattgcaggacatcgtctccgcgctggaggaccgtctcaggcccctggtgcaggcagagttatctgtgctcgtggatgttctccacagacccgagctgcttttcccagagaacacagacgccagaaggaaatgtgaaagtggcggtttcatttgcaagttaataaagcatacaaaacagctgctagaagaaaatgaagagaagctctgcattaaggtcctacagaccctgagggaaatgatgaccaaagatagaggctatggagaaaagggtgaggcgctcaggcaagttctggtcaaccgttactatggaaacgtcagaccttcgggacgaagagagagccttaccagctttggcaatggcccactgtcagcaggaggacccggcaagcccgggggaggagggggaggttccggatccagctctatgagcaggggtgagatgagtctggccgaggttcagtgtcaccttgacaaggagggggcttccaatctagttatcgacctcatcatgaacgcatccagtgaccgagtgttccatgaaagcattctcctggccattgcccttctggaaggaggcaacaccaccatccagcactcctttttctgtcgcttgacagaagataagaagtcagagaaattctttaaggtgttttatgaccggatgaaggtggcccagcaagaaatcaaagcaacagtgacagtgaacaccagtgacttgggaaataaaaagaaagacgatgaggtagacagggatgccccatcacggaaaaaagctaaagagcccacaacacagataacagaagaggtccgggatcagctcctggaggcctccgctgccaccaggaaagccttcaccactttcaggagggaggctgatcccgacgaccactaccagcctggagagggcacccaggccactgccgacaaggccaaggacgacctggagatgagcgcggtcatcaccatcatgcagcccatcctccgcttccttcagctcctgtgtgaaaaccacaaccgagacctgcagaacttcctccgttgccaaaataacaagaccaactacaatttggtatgtgagaccctgcagtttctggactgtatttgtggaagcacaactggaggccttggtcttctgggcttgtatataaatgaaaagaacgtagcgcttatcaaccaaaccctggaaagtctgaccgaatactgtcaaggaccttgccatgagaaccagaactgcatagccacccatgaatccaatggcattgacatcatcacagccctgatcctcaatgatatcaatcctttgggaaagaagaggatggaccttgtgttagaactgaagaacaatgcctcgaagttgctcctggccatcatggaaagcaggcacgacagtgaaaacgcagagaggatactttataacatgaggcccaaggaactggtggaagtgatcaagaaagcctacatgcaaggtgaagtggaatttgaggatggagaaaacggtgaggatggggcggcgtcccccaggaacgtggggcacaacatctacatattagcccatcagttggctcggcataacaaagaacttcagagcatgctgaaacctggtggccaagtggacggagatgaagccctggagttttatgccaagcacacggcgcagatagagattgtcagattagaccgaacaatggaacagatagtctttcccgtgcccagcatatgtgaattcctaaccaaggagtcaaaactacgaatttactatactacagagagagacgaacaaggcagcaaaatcaatgatttctttctgcggtctgaagacctcttcaatgaaatgaattggcagaagaaactgagagcccagcccgtgttgtactggtgtgcccgcaacatgtctttctggagcagcatttcgtttaacctggccgtcctgatgaacctgctggtggcgtttttctacccgtttaagggagtccgaggaggaaccctggagccccactggtcgggactcctgtggacagccatgctcatctctctggccatcgtcattgccctccccaagccccatggcatccgggccttaattgcctccacaattctacgactgatattttcagtcgggttacaacccacgttgtttcttctgggcgctttcaatgtatgcaataaaatcatctttctaatgagctttgtgggcaactgtgggacattcacaagaggctaccgagccatggttctggatgttgagttcctctatcatttgttgtatctggtgatctgtgccatggggctctttgtccatgaattcttctacagtctgctgctttttgatttagtgtacagagaagagactttgcttaatgtcattaaaagtgtcactcgcaatggacggtccatcatcctgacagcagttctggctctgatcctcgtttacctgttctcaatagtgggctatcttttcttcaaggatgactttatcttggaagtagataggctgcccaatgaaacagctgttccagaaaccggcgagagtttggcaagcgagttcctgttctccgatgtgtgtagggtggagagtggggagaactgctcctctcctgcacccagagaagagctggtccctgcagaagagacggaacaggataaagagcacacatgtgagacgctgctgatgtgcattgtcaccgtgctgagtcacgggctgcggagcgggggtggagtaggagatgtactcaggaaaccgtccaaagaggaacccctgtttgctgctagagttatttatgacctcttgttcttcttcatggtcatcatcattgttcttaacctgatttttggggttatcattgacacttttgctgacctgaggagtgagaagcagaagaaggaagagatcttgaagaccacgtgctttatctgtggcttggaaagagacaagtttgacaacaagactgtcacctttgaagagcacatcaaggaagaacacaacatgtggcactatctgtgcttcatcgtcctggtgaaagtaaaggactccaccgaatatactgggcctgagagttacgtggcagaaatgatcaaggaaagaaaccttgactggttccccaggatgagagccatgtcattggtcagcagtgattctgaaggagaacagaatgagctgagaaacctgcaggagaagctggagtccaccatgaaacttgtcacgaacctttctggccagctgtcggaattaaaggatcagatgacagaacaaaggaagcagaaacaaagaattggtcttctaggacatcctcctcacatgaatgtcaacccacaacaaccagcataagcaaatgaaagaaaggaattgtatttaccttttataattattattagtgtgggtatggctaatgagttctgattcacccacgaaggttacatttatgctgaatacatttgtaaatactcagttttatactgtatgtatatgattgctactctaaaggtttggatatatgtattgtaattagaattgttggcatgatgacatttcatttgtgccaaaaatattaaaaatgccttttttggaaggactaacagaaagcacctgatttgcacttgaaccagattatagatttaaaagtatatgacatgtattttgtatttaaaactagaatagccagtatttatgttttttataaaactgtgcaatacgaattatgcaatcacaatacatttgtagctcccgagtgtcctaaagggagtgcacttctttgaagctggtgtgttaatactatgtaataaatggttaactttcaaatgatgctgctgccaaaattatattaatagtgagtttcaggcccctgggcattttgtaccatgtaattatcctctggtgatgctgtttctcgttagtggcagtagtgcctccgtctcctagtgataatgctccaagtctatgaactgttaaatcagcattcattttaagaaaagcaactttagtttcaaagatacttttaagcttctaaattgatcatttaaactatttctttaaataagagagccaaattagaggctcatactttagcttgtgaagaagataatgaattttttaaagggaactttctatgcaatgttcaggataaatcgatactgctggccaatcagtgtcatctcctgggtaaattttgatgtcgcattataaagacatgcataattgatggtttctagattatctagtccaaacaatagagtttattttttcttcatctgaaccaacatgctacagtagctaagaagtattaaaactatatacatccatataaagatgaaatatgaactatctcattagaagtcatagttgaccacagacatgttattcttctgaaagagccacattttggttttatttcttgtcacatgatttcttttcttgatggatgaaaaatatgaaatgaaatcttttatatctgttgcctagttttgtacatggatctcattttacaagagaatctctctgcta

SEQ ID NO: 3 - DNA, 2402 bp, Homo Sapiens
aagagaggaaggcttaaagagccagactgcgcagccaggactggggtatgggcgctgtcctgcaggccaaagaatgaagatgtagccccgcccccaacctaggaggaggaccagcccggttcctgtcctgcccccgcaacctcgccccgattccactccgggaacctcggcgatgctgagccaagaccacttctgaatcagggatgacttgtctagtgaacgtagggtcagagccatcagttggaaaggctgggaggagcctggagaaagaggcgaccttccttgggatctgtgcgctccctccttgcctccccctccagcctcccacttggtagcaccttcctgatccccttatctctaaggcgctcagggaaatgccccgctgcgggagccttctgggaaatgctgccctggccacccaggaaccatgagccctgcagccccggtcccgcctgactccgctctggaaagtccttttgaagaaatggccctggtgaggggcggctggctgtggagacagagctccatcctccgccgctggaagcggaactggtttgccctgtggctggacgggaccctgggatactaccacgatgagacagcgcaggacgaggaggaccgtgtgctcatccacttcaatgtccgtgacataaagatcggcccagagtgccatgatgtgcagcccccagagggccggagccgagatggcctgctgactgtgaacctacgggaaggcggccgcctgcacctctgtgcggagaccaaggatgatgccctagcatggaagacagcactgctggaggcaaactccaccccggccccagctggagccaccgtccctcccaggagccgccgggtttgctccaaggtcaggtgtgtgacccgctcgtggagcccctgtaaggttgagaggcggatctgggtgcgcgtctacagcccgtaccaagactactacgaggtggtgccccccaatgcacacgaggccacgtatgtccgcagctactacggaccgccctacgcaggccctggcgtgacgcacgtgatagtgcgggaggatccctgctacagcgccggcgcccctctggccatgggcatgcttgcgggagccgccactggggcggcgctgggctcgctcatgtggtcgccctgctggttctgagccctgggactcggagcactgacccctgcgcttggattgctagactcctcttcctcctggaccccatcctctaccatccaagccctgtcccactttggccctatcctctccattagctccttccgggtttggaccattccccccactccctacccttaatccccacatgggaagaagctatcatcacaggtacaaacatcgcttgaagtcttcacatctaccactagacacccccaaaatctgttatagacatttatggatacatttcctctaaacacaacagggcacagcaaatacgacttcatttggcttcgagttccccaggcgctgtagacacaacatgaatcgggctctctgctctctccttagggagctcgagtcctggtggggagaacaggagtaaacaaggacttgacaaagctgaagagttatcagtcctttgacaaggacaggtggggcagggagcaagacaggtaggctggaagaacagttattggcaagtatgcagagccgtgaacgtcatggcatgtccaaggaattaaatgggagttcatttgggctggggtggaggctgggatcagaccgtggtgggccttcaagctaaggagcttcctaggtgaaaggggagatgtgagccttctctggagggaagtttcatgattgcatctataatgaatatattgcctgttttgtgaatactgacacatgtccatacctaaaacactcctgagttaagtcccatccttcccacaaacagcttcctggctggtacccatgataacaattgagctgaacctggggacccctggttggggaacaggtgagttctatttgagacttccagccctagaaagctgcctccgtccagaaatgcctctcacaccaggagctcggccctctctttatagctgtgactgtcaccctctcaggctttgtctcatccttcattctgaataagatggcagtgttctcctctggggcctgatccacctctacaccagcccaggaagccccatctgtgcctgccctcaggtggtccaccagtctccccctttggttcccttccagtctcttccccctttctatcccaatcaccaatagaaatgctaacatccctgcctggtagccagactagcccactaaagctcccctgtaaatgggggctccattagttctgctgccgagactaataaagatttggttggttctagcagtaaaaaaaaaaaaaaaaaaaaaaaaaaaa

SEQ ID NO: 4 - DNA, 1508 bp, Homo Sapiens
gctggaggagcctcgaggctgaggctgccggggggctgtgggctaccgggccgccggcgcctcagcgatgttttactcagggctcctcactgagggcggccgcaaggagaccgacatgcgggaggcggcgtcactgcgacagcagcgccggatgaagcaggcggtgcagttcatccacaaggactccgccgacctgctgcccctggacggcctcaagaagctgggctcgtccaaggacatgcaacctcataatattctgcagaggcgcctcatggaaaccaacctgtctaagctccgaagcggtccccgtgtcccttgggcctctaagacgaacaaactcaatcaggctaagtctgaggggctaaagaagtctgaggaggatgacatgattttggtttcttgccagtgtgctggaaaggatgtgaaagccttggttgacacaggctgcctatataatctcatctctttggcctgtgtggacagattgggactcaaggagcatgtcaaatcccacaagcatgaaggagaaaagctttctctaccccggcatctcaaagtagtgggccagattgagcacctagtgatcacactgggctccctccgcctggactgcccagcagctgtggttgatgacaatgagaaaaacttgtcccttggtctacagactctccgatctctgaagtgcatcataaacttggataagcaccggctgatcatggggaagacagacaaggaagaaatcccttttgtggagacagtctctttgaatgaagacaacacttcagaagcataactacagcctgcagcatgtctgcacgtgtgcatgcatacacaccgggttgacagattgagaaaactgggtttgaaccaaatgccgtagtgacttgctgtggaccaagtccttccatctaatagaagctccaggggctccttcccattcagacctctctagactatagtctatgcttagagatcttgtctggttatggccattgttttttactactttgatcacttaacttatagaccttttttgacactgccagtctcacttgtggcctatttctctgcttcttccaggaatttgcttttattagtcaagtataggggctgccaggttctgtgtctccatagatatatgtgcttcttttcctatagctaaatgtataataaacaggaacctgacctttacctcctttcagctgtttcaaacaggtgccaggatacctatgtcttagaattagagtttcttcaaattgattcattgatttctcaagtatggattatgtgaaagagcccagggacattatccattacagtctaactctttcatttaaaggtccagagaggcaagtgaattgtctaagttcatatattaggtcagtgactgaagggaccaagaacgcagacctgatttccaagccaagactcccatgctgcctcatttgtattcaagcctttaacaggagggcaaagaggtgagaatgtgttaaaaaaaaaaaaaaaaa

SEQ ID NO: 5 - DNA, 808 bp, Homo Sapiens
tgctcccttgggctctagagaggaggcccctcttagccctcagcccctccttcctctctatcttaaagtaatttgatcctcaggaatttgttccgccctcatctggcccggccaaatcccgatttgacaaatgccaggaaaaggaaactgttgagaaaccgaaactactggggaaagggagggctcactgagtaaccatcccagtaacccgaccgccgctggtcttcgctggacaccatgagtcacactgtccaaaccttcttctctcctgtcaacagtggccagccccccaactatgagatgctcaaggaggagcacgaggtggctgtgctgggggggccccacaaccctgctcccccgacgtccaccgtgatccacatccgcagcgagacctccgtgcccgaccatgtcgtctggtccctgttcaacaccctcttcatgaacccctgctgcctgggcttcatagcattcgcctactccgtgaagtctagggacaggaagatggttggcgacgtgaccggggcccaggcctatgcctccaccgccaagtgcctgaacatctgggccctgattctgggcatcctcatgaccattctgctcatcgtcatcccagtgctgatcttccaggcctatggatagatcaggaggcatcactgaggccaggagctctgcccatgacctgtatcccacgtactccaacttccattcctcgccctgcccccggagccgagtcctgtatcagccctttatcctcacacgcttttctacaatggcattcaataaagtgcacgtgtttctggtgctgctg

SEQ ID NO: 6 - DNA, 2217 bp, Homo Sapiens
ttttttgcgagtggcgggccgactgtgtagtccgctccggcagcgcgctctgcccggcttcctcagtctcctcgccgggagcgtccgggagcagctccgaggccgcggcgaaaccagccttgtcatttcagcattctggccttccctatgaggaggaagatcaacgaagtcacagggcccttctagcccaatccagagctgtaccatggcagagacaagagaagaggagacagtgtcagcagaagcctcagggttctcagacttgagtgactcagagttcctggagtttctggacctagaagatgcccaagagtcaaaggctttagttaacatgcctggcccatcttctgaatcccttgggaaggatgacaaacccataagcttacaaaactggaaaagaggattggatatattatcacccatggagagattccaccttaaatatttatatgtcactgacctggctactcagaactggtgtgaactgcaaacagcatatgggaaggagcttcctggtttcttggcacctgagaaggcagctgtgttggacactggtgccagcatacacctagctagagaactagaacttcatgatcttgtgactgtcccagtcaccactaaagaagatgcttgggcaattaagtttctgaacatacttttgctgattcctaccctgcagtcagaagggcacatcagagagtttccagtgtttggggaaggggagggtgtacttcttgttggagtgattgatgagctgcactatacagccaagggggaactggagctggcggaactcaagacacgcaggcgccctatgctccctctggaagctcagaagaagaaagactgttttcaagtcagcctatacaaatatatctttgatgccatggtacaaggaaaagtgacccctgctagcctaatccaccacacaaagttgtgtctagaaaagccactggggccatcagtgctgaggcatgcccagcagggaggcttctctgtgaagtctttgggtgacctcatggaacttgtcttcttgtctctaacactgtcagacctcccagttattgatatcttgaagattgagtatatccaccaagagactgccactgtgctgggtactgagattgtagccttcaaagagaaggaggtgagagccaaggtgcagcattatatggcctactggatgggccaccgagagccccagggagttgacgtggaggaggcttggaagtgccggacgtgtacctatgcagacatttgtgagtggagaaagggcagtggagtgctcagctctacactggcgccccaagtcaaaaaagccaaatgaatagaaggtatgctttcaagaatgttgatccttcctgctcctgttgtacctaagcaaaagaggaccagtctctgagcttggcttttatggagagtgttcttattttggttcttttttttatttccacaacctctaaccacattcagtccaggaccaaggctcagggatgagtgggagagatgggttatactgtccctggagcttcatcatgattgcctgagaagacagatgctcatcatggctggaatgaaggtatccttcagtaaactttgctttcctaagaaaattcttcagtttctgataagtcatccctatttttatcttgatcaaggctttctacagttacataataaaatgaaatgctgtccaggacagttgaactgatggttttttcataactgcagtccttcaaagatgaccaccatatatagttgtgtacgtgttattccaagcctttaaatatatacataaacatattttggaatcagaatgagcagaccaaaacataaacaataaatattctcaaagagacaagggaagatgaagtagaaacaggaagtcataaatattagatacgaaaaacataatacatggctgggtgcggtggcacatgcctgtaatcccagcactttgggaagctgagatgggtggatcacctgagctcaggagttcaagagcaacctgaccaatacggtgaaagcccgtctctactaaaaatacaaaaattagcctggggtggtggcgtgcgcctgtagtcccagctacttgggaggctgagagaggagaatagcttgaacctgagaggcagaggttacagtgagctgagatcatgccactgcactccagcctgggcaacagagtgagactctgtcttaaaaaaaaaaaaaaaa

SEQ ID NO: 7 - DNA, 1824 bp, Homo Sapiens
cagctctctgtcagaatggccaccatggtaccatccgtgttgtggcccagggcctgctggactctgctggtctgctgtctgctgaccccaggtgtccaggggcaggagttccttttgcgggtggagccccagaaccctgtgctctctgctggagggtccctgtttgtgaactgcagtactgattgtcccagctctgagaaaatcgccttggagacgtccctatcaaaggagctggtggccagtggcatgggctgggcagccttcaatctcagcaacgtgactggcaacagtcggatcctctgctcagtgtactgcaatggctcccagataacaggctcctctaacatcaccgtgtacgggctcccggagcgtgtggagctggcacccctgcctccttggcagccggtgggccagaacttcaccctgcgctgccaagtggagggtgggtcgccccggaccagcctcacggtggtgctgcttcgctgggaggaggagctgagccggcagcccgcagtggaggagccagcggaggtcactgccactgtgctggccagcagagacgaccacggagcccctttctcatgccgcacagaactggacatgcagccccaggggctgggactgttcgtgaacacctcagccccccgccagctccgaacctttgtcctgcccgtgacccccccgcgcctcgtggccccccggttcttggaggtggaaacgtcgtggccggtggactgcaccctagacgggctttttccagcctcagaggcccaggtctacctggcgctgggggaccagatgctgaatgcgacagtcatgaaccacggggacacgctaacggccacagccacagccacggcgcgcgcggatcaggagggtgcccgggagatcgtctgcaacgtgaccctagggggcgagagacgggaggcccgggagaacttgacggtctttagcttcctaggacccattgtgaacctcagcgagcccaccgcccatgaggggtccacagtgaccgtgagttgcatggctggggctcgagtccaggtcacgctggacggagttccggccgcggccccggggcagccagctcaacttcagctaaatgctaccgagagtgacgacggacgcagcttcttctgcagtgccactctcgaggtggacggcgagttcttgcacaggaacagtagcgtccagctgcgagtcctgtatggtcccaaaattgaccgagccacatgcccccagcacttgaaatggaaagataaaacgagacacgtcctgcagtgccaagccaggggcaacccgtaccccgagctgcggtgtttgaaggaaggctccagccgggaggtgccggtggggatcccgttcttcgtcaacgtaacacataatggtacttatcagtgccaagcgtccagctcacgaggcaaatacaccctggtcgtggtgatggacattgaggctgggagctcccactttgtccccgtcttcgtggcggtgttactgaccctgggcgtggtgactatcgtactggccttaatgtacgtcttcagggagcaccaacggagcggcagttaccatgttagggaggagagcacctatctgcccctcacgtctatgcagccgacagaagcaatgggggaagaaccgtccagagctgagtgacgctgggatccgggatcaaagttggcgggggcttggctgtgccctcagattccgcaccaataaagccttcaaactccctaaaaaaaaaaaaaaaaaaaaaaaaaaaaaaaaaaaaaaaaaaaaaaaaaaaaaaaaaaaaaaaaaaaaaaaaaaaaaaaaaaaaaa

SEQ ID NO: 8 - DNA, 4416 bp, Homo Sapiens
ccagtgtaagagttccgctattcggtctcacacctacagtggactacccgatttttcgcttctcttcagggatgagtcatgtggtggtgaaaaatgaccctgaactggaccagcagcttgctaatctggacctgaactctgaaaaacagagtggaggagcaagtacagcgagcaaagggcgctatatacctcctcacttaaggaacagagaagcatctaaaggattccatgataaagacagttcaggttggagttgcagcaaagataaggatgcatatagcagttttgggtctcgagattctagaggaaagcctggttatttcagtgaacgtggaagtggatcaaggggaagatttgatgatcgtggacggagtgactatgatggtattggcaatcgtgaaagacctggctttggcagatttgaacggagtggacatagtcgttggtgtgacaagtcagttgaagatgattggtcaaaaccacttccaccaagtgaacgcttggagcaagaactgttttctggaggaaacacggggattaactttgagaaatatgatgatataccagtagaggcaaccggcagtaactgtcctccacatattgagaattttagcgatattgacatgggagaaattatcatggggaacattgaacttactcgctatactcgtcctactccagtgcaaaaacatgccattcctattattaagggaaaaagagacttaatggcttgtgcccaaacaggatctgggaaaactgcagcatttcttttacccatactgagtcagatatatacagatggtccaggagaagctttgaaggctgtgaaggaaaatggaaggtatgggcgccgcaaacaatatccaatatccttggttttagccccaacaagagaattggctgtacagatctatgaggaagccagaaaattttcctaccgatctagagttcgtccttgtgtagtttatggtggtgctgatattggtcagcagattcgggacttagaacgtggatgccacttgttagtagccactccaggacgtctagtggatatgatggaaagaggaaagattggattagacttctgcaagtacttagtgttggatgaagctgataggatgctggatatgggatttgaacctcagatacgtcgtatagttgaacaagatactatgccaccaaagggcgttcgtcacaccatgatgtttagtgctacttttcctaaggaaatacagatgcttgctcgtgactttttggatgaatatatctttttggctgtaggcagagtaggctctacctctgagaacatcacacagaaagtagtttgggtggaagacttagataaacggtcatttctactggacattttaggtgcaacagggagtgattcacttactttagtgtttgtggagaccaaaaagggagcagattccctggaggatttcttataccatgaaggatatgcttgtactagtattcatggagaccggtcacagagagatcgagaggaggcccttcaccagtttcgctcaggaaaaagcccaattctagtggctacagctgtggcagcacgaggactagacatttcaaatgtgagacatgttatcaattttgatttgccaagtgatattgaagaatatgtgcatcgtattggccgtacaggacgtgtaggaaacctgggccttgccacctcattctttaatgaaaaaaatatgaatattacaaaggatttgttggatcttcttgtagaagctaaacaagaagtgccttcttggttggaaaatatggcttatgaacaccactacaagggtggcagtcgtggacgatctaaaagtaatagattcagtggaggatttggtgccagagactatcgacaaagtagtggttccagcagttctggctttggtgctagtcgcggaagcagcagccgcagtggtggaggtggttacggcaacagcagaggatttggtggaggtggctatggaggcttctacaatagtgatggatatggaggaaattataactcccagggggttgactggtggggcaactgaatctgctttgcagcaaagtcacccttacaaagaagctaatatggaaaccacatgtaacttagccagactatattgtgtagcttcaagaacttgcagtacattaccagctgtgattctcctgataattcaagggagctcaaagtcacaagaagaaaaatgaaaggaaaaaacagcagccctattcagaaattggtttgaagatgtaattgctctagtttggattaaactcttcccctcctgctttagtgccaccccaaactgcatttataattttgtgactgaggatcgtttgtttgttaacgtactgtgactttaactttagacaacttactactttgatgtcctgttggctcagtaatgctcacgataccaattgttttgacaaaataaatttactaaacttggcctaaaatcaaaccttggcacagaggtatgatacaactttaacaggagtcatcaattcatccataaatataaaaagggaaaaaaacttaaggcagtagtctgcattaggactgtttgagttttgcagacttggggttgggagaacatcttaaagcattaaagcatagttttttgtatggccaaccttactaaattaagttctgacttgctcactctatcctggataggcacttgggaacttacactctttaagccattccagtcatgatgaggtggaatgtatcagtataccaattaatatttttgaaagagttcttttaggttaatttaagtacagcaatttctcatgtaatgtttagggagtttattctaacctaggcaaacggcatgctatcacaagaaaggtttaaagctttgataaaatgggggagatttaatcagtttttttaatgcctgctataaaaatttgaaatattagaatggccgaccatggcagtgaccaggcctcactacaggcctggttggattctggtctttaatgcatgctagtgttgatgttttttggtcaagaacggtttaaacaggaaggattgtgcagcaggctttaatttaatgtagattcatactgctctgttaaagctgcattgaaatgttaaaatggcttacacttgcagactttgcaaatcttaagactaacaaatccttgaaatcacacagcttgcaaatacgtactaaactgcacaaggtgtgtgttctatatgtgcagttttagcgtattttagttgcataggtttccatggtatttatagtctcttgtgctaaatttggccaaagatgattgtccaccactaaaaatgcctctcccacttggaattctgtactgattttgtggccagatgcaatgatctttaaaaacaaatcttttcaatggcataagaagttgacaaaaatttcttaaagtgcaatagattttcaagttattgtgccttgttctaaaattttaagtagggcacttgacagtattgaggtcatttgttaaggtgctatttcaattagtgtaggtttagactcttgtacatttctcccataactttttacaaagtattttgttgcacattcagagaattttatatatatatgtcttgtgtgggtgtcctcgaccttccaatcttatttcgtctcttggagattgttgaatgcagccagtgaagaagtagattcctaaattttattggggaccatggaatggtagttgagaagaaaactatttgcacacaacagattttagatactttttgctgctagttgtgtaatatttattgaacattttgacaaatatttatttttgtaagcctaaaaatgattctttgaaagtttaaagaaacttgaccaaaagacagtacaaaaaacactggcacttgaatgttgaatgtcaccgtatgtgaaataatatattttggggtagtgtgagcttttaatgttaagtctgttaaacttgagtcaaattaagcagacccggcattggcaatgtagctgtaattttctgacaaaatttaagacaaaattgtcaacttgaaactaaaacatgccaaggttttgatatacttgtcttaagatattaatgaaacaattttgaacactgataggaaggtccacatccacaaagtttctcttgagttttgttatgtgttttgctgtgtttgattttcagtgattgtctggtatatttacagtcctcaaacatggttatttctgtcagtgacttaacattcggttttaccagccagcagtattcttcagtaaataaagaatggaattgctgaatgtaatcattgaacctcgagtcactgtaaaagttcagtaattgcttattgtattagttttagatgctggcaccgcatgtgctctgtttattctgattttactaaaataaaaagttcaaaagtcaaaaaaaaaa

SEQ ID NO: 9 - DNA, 9120 bp, Homo Sapiens
gcggccgccgccctcgccaccccgcctgcccactcccgccgccgccccgctctcgctttccccccggcctcccctcgccccttcccctcccccttcccggcgcactcggggggctgggaacgagctgccatgtgatgcgcgtcccctccgcgagctttcggtgacccacgaactgcccacctcgccggctgccgggagggggctgcgagccgggaagacgcggggaagaggaggcggaaaaggacgcaaagttctccggcgagcgcattcattcacatagctcccagttttaacatttcgccacctactgaagacatcatttgggaccaagctgatgagcccttgaagcacagcagataagagtgttgctgttgatcatctttgcctgggaagttgaatgataaagccagaagaaagcatgctttctgatcatttgcagctgtctgcttcagaaagtgagggctccaggaatgaggagaatcttcaagaacttcctcgcactgtgacatgtctgatcccttgctcccatccctgcagcatgaacaaggtggacactcactgacctgtcacaaggttgccccacaaaactttggggtccatgtctgaatggattgccagagccttctcatctctcccttcgcccagttccctgcatcctaagactcgaaggcagcacaggacctggaaaaattacatggtgtgaacggcatgtctgtggatgagaagcctgactcccccatgtatgtgtatgagtccacagtccactgcaccaacatcctcctgggcctcaatgaccagcggaaaaaggatattctctgtgacgtgactttgatcgtggagaggaaggagttccgggcccaccgggctgtgctggccgcatgcagtgaatatttttggcaggcgctggttggacagacaaaaaatgatttggtggtcagcttgcctgaggaggtcacagccaggggctttgggccgctgttacagtttgcctacactgccaagctgttactcagcagagaaaacatccgcgaggtcatccgctgtgctgagttcctgcgcatgcacaacctggaggactcctgcttcagcttcctgcagacccagctcctgaacagtgaggatggcctgtttgtgtgccggaaggatgctgcgtgccagcgcccacacgaggactgcgagaactctgcaggagaggaggaggatgaagaggaggagacgatggattcagagacggccaagatggcttgccccagggaccagatgcttccagagcccatcagctttgaggccgccgccatccccgtagcagagaaggaagaagccctgctgcccgagcctgacgtgcccacagacaccaaggagagctcagaaaaggacgcgttaacgcagtaccccagatacaagaaataccagcttgcatgtaccaagaatgtctataatgcatcatcacacagtacctcaggttttgcaagcacattccgggaagataactctagcaacagcctcaagccggggcttgccagggggcagattaaaagtgagccgcccagtgaagagaatgaggaagagagcatcacgctctgcctgtctggagatgagcctgacgccaaggacagagcgggggatgtcgagatggaccggaaacagcccagccctgcccctacccccacggccccagctggggccgcctgcctggagagatccaggagcgtggcctcgccctcctgcttaaggtctctgttcagcataacgaaaagtgtggagctgtctggcctgcccagtacatctcagcagcactttgccaggagtccagcctgcccttttgacaaggggatcactcagggtgaccttaaaactgactacacccctttcacagggaattatggacagccccacgtgggccagaaggaggtgtccaacttcaccatggggtcgcccctcagggggcctgggttggaggctctctgtaaacaggagggagagctggaccggaggagcgtgatcttctcctccagcgcttgtgaccaagtgagcacctcggtgcattcttattctggggtgagcagtttggacaaagacctctctgagccggtgccaaagggtctgtgggtgggagccggccagtccctccccagctcgcaggcctactcccacggtgggctgatggccgaccacttgccaggaaggatgcggcccaacaccagctgcccggtgccaatcaaagtctgccctcgctcaccccccttggagaccaggaccaggacttccagctcctgctcttcctattcctacgcggaggacgggagcgggggctcaccctgcagcctccctctctgtgagttctcctcctcgccctgttcccagggagccagattccttgccacagaacatcaggaaccaggcctgatgggagatggaatgtacaaccaagtgcggccccaaattaaatgtgagcagtcttatggaaccaactccagtgacgaatccggatcgttctcggaagcagacagtgagtcgtgtcctgtgcaggacaggggccaggaggtaaaacttccttttcctgtagatcaaatcacagatcttccaaggaacgatttccagatgatgattaaaatgcacaagctaacctcagaacagttagagtttattcatgatgtccgacggcgcagcaagaaccgcatcgcggcccagcgctgccgcaaaaggaaactggactgtattcagaatttagaatgtgaaatccgcaaattggtgtgtgagaaagagaaactgttgtcagagaggaatcaactgaaagcatgcatgggggaactgttggacaacttctcctgcctttcccaggaagtttgccgagacatccagagccccgagcagatccaggccctgcatcggtattgccctgtcctcagacccatggacttgcccacggcctccagtattaaccctgcgcccttgggtgctgagcagaacattgcggcctcccaatgcgcagtgggggaaaacgtgccctgctgcttggagccaggcgcggctccccccggacccccctgggcacccagcaacacctccgagaattgtacctctgggaggagactagaaggcactgacccgggaaccttctcagagagaggacctcctcttgaacccaggagccaaacagtgaccgtggacttctgccaggaaatgactgataagtgtacaactgacgaacagcccaggaaagattatacctagtgactcggctctgcctcccagtccgcacacctctcccatccaggcgttcttcagtcagcctgtggcactgttcatctgctgtcccgaagaaaccgagaacacatttggtgcacactacagcggtcttagcagcaatactgttccgaagtatcctctcctcttctcgagcaggagtgatagttaccttcacaatggtgctaccccttgcccaggcaaggaaagacagcagtgatgacactgtctgtctgtggctcaatttcagtcttcacagggatagactacaacacctctaggccccaaccacggattttttttctcagtggcccatgtcacaaaccctatctcaggaatttcttctgaatgttcaatttttttcattgaagacagcttctatacacatcaaagttttatagctagactgtacatattatatataatatatatataaaaaatatatatatatatatatatccatatgcaaaagtcctgcatgcctcaactttctcatcctaaaactggaaacttatttctcatttagaaacaggttccaacattcctcttcttttgtctctgatgctagaactagtttggtaactgttaacgtggtcatttttcttgcttcacagttcaattttcaattcgtacttatttatggacaaaattcagtgttggaagctttttcccaaggttttatttcagatttctttttcgtttggtttggttttggcacctccaagtggtgtcatttgagcattgtaggtttgttttttgtttgtttggggggttttgtttgtttttgtttttgtttttgttttccttgcagatactgtacagtaatggtcaactttgccacttgcactgagttttgggtcaaacctattttcttaaatgaagttgtaacttcggtataactcaagtatactgtatattctttgcttttagttaaaaaagtaaaacattttagctaattaaaaagcactcaggtgataattatgtaggaaaaacaatcttgccaaataatgaattcatcctaggatgtgtagacaataatctgcttgaatatttttatatttcacctcctccccacctttccctaagcaaagtttaaacgcagatagagagttcagagttgatgctggatgttcagattcctaagtggggagagagtttggacatctcactcaaaagtacatcagaaaaacaggaatccgtgattttataccagaactcagcaggcattggctcctagaaatcaagttagaaagttttcacccagggagtaagtcccattcatttcaacacgtcctgaggcctcggcttgctcttggaagtggtgtgcagtaggacctgctcccctgaaggacggggccaaccagccactggctttcctgcccaggcttggcctcccaggacatctggcctgaggggatttgaatcacagccccgaaggtcctgccttcaccccattgggagagagcagggcatcctggcatctgcgatccatccctgacacaggctgacacattctttctcctttccttctccaaaggcttggagttttcttctgaggtttttctgccagtgtcttgtctgaaggcagacttcattctgaggctttggacaagctattcaccgggaaccctccctgtccccttcccgaatcacacacataccctaccctcacctgatgataattttctcttcttgctgcaaaactggttggcttgcaacccagagagagcagcttcccttggctctgggggccgtgttggccccagccacgtttacaggaaggtgtgccccagaggaggaggaatcagctccctcgctccagtggccttgggtccgggtctcactgagcagcccgagggccactccagcccggctggggaagagagtcctgaacggtttgatgtggggatggggtggtgggcagtggggaatagatggttgactttgtttctttatttgtgccattgtttggacaatattaaagctgcatgtaaaaggggaaattagtatatgatgtaggctaaaagtgaaatcatagtaacatatgttttagtattattaacttttttctgtacaaatattagcactaaatgtttaaatatgtatgaatgccagaaatttgtcagttcatgcagtaggataaaaaaaaaaaaaaaaaaaaaagggcttttctttttaaacagttccacttttaaaacctgcctctgggtttttgttttttcttgtttgtgtgtgtgtgtgtgtgtgtgtgtgtgtgtgtgtgtgtgtgtgtgtgtctgaaacagatcttgataaagctctgtgttggagctgctggtttttgttatggttgttggaatttcttggcctactaggacagttctgtgcttcaccatgaggtttgcctttgtggaaaactcgtgggtgacagtgagaatataaactcaatgtgaatcacgtgatacttcggcaggcgtgtgttacagtggagtcagctgacagtattttgctttttaactctattgttgcctttccaagtgacctctcctcttcttttaaaaaaagaacactttctgctcatatcataaccaggtccaacccagcttcttggcatgaggtttaccctggtaacaactcatgtgcaactggtagtcttgaccacattccatccatttcctcaggtttctgtggttcagtagcccagacctgtttggcagccatttctagcaggggcggggcctctttatttctctccaccctaactcagacctcaccttcctcccacccacccctgccttgcttttcttcctcttcccccaacctaacttctgccatgggaactggttaaaaacactgctctaaaaaccatcttccaatttcatagagatttctcacaagttatttcattcataatccaccatgaacagtgactagcttcgtgcagttgttcatgtgatgtgtgtgtgtcttttcctattcagaactatgtgcttgtcaaaattatttctgggttgattcaaagggaggacttgctggggaccagaatccaaacggcctcaagtggaattttaaaacctagcctgtctcttttccctgggatccctctgtcaaccccacgccttttaggaaaaagaaaagtgagtgaacagcaaggaagagtgtttgcacagtacagtaacatttggttgttcttaaggctcttttcttacaaaaataagagaccctccaaccacgggctgtttaggaggatgcctgcttgggtctccaaatggctggggtaggaatggttgttggggcagagccagtggaggtgagtgaccctgagactaatgaacatcccacctaaatccagtcctccccttggatctgcctttgtcctgcttgtgtatccaggcaacctcttttcaagttggtcaggctttggacaggtgagtgatttgctgtatgtgtttgtttctctgcgttacctgggggtgccttgattaaaatcgaactttattacatactgattctggaacaaaacagttagaaaaactttaaactttaaaaaaaaaaaaaccgacaaagttacgaggccatcctgctatttatcttctgagttcccagcaatgactcaggcatcagagatgatgctgcagtggaaaacctgactctgtgtgtctgcaactgaatgttgtgcgagtaatttattaactgtctttctaaaggtttgctgcttttaagatgcactataattcgggatgtaatccttacattgcttttccaaggaagggaacaaaagtctagtgattagtatgccaactgccactactccttcaaaaggagccaggaccagcgacaagactcatgagaggactggctaaagtgaagtgtgcacagtgtgaagtttaatgctgttgtcaagaggcctaaacccacattttctcttttaatattttatgattgccatcaaagaagaagaaaaagaaggaacagacaaaggtttgaaaatgataagcctgttaagacaccaaaaactcctgtcccgtgaagctgcttgacatcctgtggagtagcataatcctctcaaaatgaggaagagctgcctgcaaagctttctcaagtccctatttggctacctacttctctacattatgccccatttaaactaggagctgtcttagaaatgacttcaaactgcttcactattgcttacagtttaggaggagtctcagatccagaaggagcaagaatcaagtttggtcctcaaatgactgtaaatagactaaagaacaaggtgttttttgtttttgtttttgttttctaagaataaagctgttcgttgtatcatgagttagtgtttcttccccaaactgaagactgtgttggaagtgcaatttctggtgagtcagtccacaatacaatgccctgtgtggagttggtattcatacaggaaatctgtgtgcacgaggcattgtgtgttgaaagtgtatgtttatagtactgcctgagccatctcatgaccccagcgtccaaaaccgatgctgtagaacagaacatatctgtcacaaataggtgtgtgcaaatagcatttgtacatagaaaagtctcattgtggcagattgagcataaattattcaactgacggtgcaaaaacattacttgcaaagaaaagtttatagtattttcctacactccaccctgggagatgatatttctatcaaatgaatatcagtgcattttaaatgtaatatgaaaacgatgctgccattttgtgaagaatacccacttggttgcagaggccaactttcatagctttgatttaatgttgtgacacggtgtatgcattttgctgtcaagcaatggataaacagctctgactttcattctcattccagtttattgacctcagataaaacactggcccttcttagaagcagaagtgtgcaccaagaccattcatttcaggtagactcacattcagtgccaagtgctcccatgggaataatcagacgcatatgttgcgaaagagtgaagggacttggacaaagaggggttttcctacagatggatgctcagtcttctaccaaaacatgtttggaggcagaactatgacctccccttaagtcctaacaatgtattttgtgtgtgcaaatcctgggatgcccgtttcacgctctgacataaagacatggcacctctagtgagtgatcaggaagattccatatgcatttgggagcttcaggtgcttgttagacacagtgagccattcaaggcaagcaccacctttgctagtgaggccaagagagcctgtgacaatttgacaatttgttccagaaccagtctgatgcaagtgcacctctaatatatgccttacaaactccagaggccatattcaaaacagggtcttctcagtgtatgcaaggggctgcagcccctcttctcttcctccccaggttgaacaatacggacagttttcacacatatctacctgtataaccctctgtacctctcataactggtcaacgactgtaacaggttacatcaggtgtttttctacatactttttacacagattctatgcgattaatgtaatttaattcaatgcatcattttattgtactagttcttaggcttgtccttatttttttctaagtgattgtggtttttctcgtggtttttattgtaaaaaatgaaaggctgttgatgcttattctctgtaactaagaattttaccttttgggggaaaaaagcattgctatgaactaatggaattggaacttcatttactcattgtaaatacactattgtgcaaaaaaagttttcactcaattgaattgctagtgttaactgaattttgtctagacaccatttctgttgatgaaataaagacatatcattatgcattgtaaactg

SEQ ID NO: 10 - DNA, 2317 bp, Homo Sapiens
cggacgcgtgggtgagcagggacggtgcaccggacggcgggatcgagcaaatgggtctggccatggagcacggagggtcctacgctcgggcggggggcagctctcggggctgctggtattacctgcgctacttcttcctcttcgtctccctcatccaattcctcatcatcctggggctcgtgctcttcatggtctatggcaacgtgcacgtgagcacagagtccaacctgcaggccaccgagcgccgagccgagggcctatacagtcagctcctagggctcacggcctcccagtccaacttgaccaaggagctcaacttcaccacccgcgccaaggatgccatcatgcagatgtggctgaatgctcgccgcgacctggaccgcatcaatgccagcttccgccagtgccagggtgaccgggtcatctacacgaacaatcagaggtacatggctgccatcatcttgagtgagaagcaatgcagagatcaattcaaggacatgaacaagagctgcgatgccttgctcttcatgctgaatcagaaggtgaagacgctggaggtggagatagccaaggagaagaccatttgcactaaggataaggaaagcgtgctgctgaacaaacgcgtggcggaggaacagctggttgaatgcgtgaaaacccgggagctgcagcaccaagagcgccagctggccaaggagcaactgcaaaaggtgcaagccctctgcctgcccctggacaaggacaagtttgagatggaccttcgtaacctgtggagggactccattatcccacgcagcctggacaacctgggttacaacctctaccatcccctgggctcggaattggcctccatccgcagagcctgcgaccacatgcccagcctcatgagctccaaggtggaggagctggcccggagcctccgggcggatatcgaacgcgtggcccgcgagaactcagacctccaacgccagaagctggaagcccagcagggcctgcgggccagtcaggaggcgaaacagaaggtggagaaggaggctcaggcccgggaggccaagctccaagctgaatgctcccggcagacccagctagcgctggaggagaaggcggtgctgcggaaggaacgagacaacctggccaaggagctggaagagaagaagagggaggcggagcagctcaggatggagctggccatcagaaactcagccctggacacctgcatcaagaccaagtcgcagccgatgatgccagtgtcaaggcccatgggccctgtccccaacccccagcccatcgacccagctagcctggaggagttcaagaggaagatcctggagtcccagaggccccctgcaggcatccctgtagccccatccagtggctgaggaggctccaggcctgaggaccaagggatggcccgactcggcggtttgcggaggatgcagggatatgctcacagcgcccgacacaaccccctcccgccgcccccaaccacccagggccaccatcagacaactccctgcatgcaaacccctagtaccctctcacacccgcacccgcgcctcacgatccctcacccagagcacacggccgcggagatgacgtcacgcaagcaacggcgctgacgtcacatatcaccgtggtgatggcgtcacgtggccatgtagacgtcacgaagagatatagcgatggcgtcgtgcagatgcagcacgtcgcacacagacatggggaacttggcatgacgtcacaccgagatgcagcaacgacgtcacgggccatgtcgacgtcacacatattaatgtcacacagacgcggcgatggcatcacacagacggtgatgatgtcacacacagacacagtgacaacacacaccatgacaacgacacctatagatatggcaccaacatcacatgcacgcatgccctttcacacacactttctacccaattctcacctagtgtcacgttcccccgaccctggcacacgggccaaggtacccacaggatcccatcccctcccgcacagccctgggccccagcacctcccctcctccagcttcctggcctcccagccacttcctcacccccagtgcctggacccggaggtgagaacaggaagccattcacctccgctccttgagcgtgagtgtttccaggaccccctcggggccctgagccgggggtgagggtcacctgttgtcgggaggggagccactccttctcccccaactcccagccctgcctgtggcccgttgaaatgttggtggcacttaataaatattagtaaatccttaaaaaaaaaaaaaaaaaaaaaaaaaaaaaaa

SEQ ID NO: 11 - DNA, 3348 bp, Homo Sapiens
cgcaatttccactcgcggggagcaggaaacccggcgcagccgggcgcattgggccgcgatgcaacagcagcagcaggagtcgccccggggcagcagcggcagcagcagcagaggcagcagcgggcggcgctgagccgccgccgccgccactgaggaagaagccggcccagccgccgccgcgtccggaccctcgcgcctggatcccagcgccccgatcccggcgccccaacccccacgcccgcctccgccaactttcacgctgcctcggcggcccggcccggctcgacgccaatggtggaggccatagtggagtttgactaccaggcccagcacgatgatgagctgacgatcagcgtgggtgaaatcatcaccaacatcaggaaggaggatggaggctggtgggagggacagatcaacggcaggagaggtttgttccctgacaactttgtaagagaaataaagaaagagatgaagaaagaccctctcaccaacaaagctccagaaaagcccctgcacgaagtgcccagtggaaactctttgctgtcttctgaaacgattttaagaaccaataagagaggcgagcgacggaggcgccggtgccaggtggcattcagctacctgccccagaatgacgatgaacttgagctgaaagttggcgacatcatagaggtggtaggagaggtagaggaaggatggtgggaaggtgttctcaacgggaagactggaatgtttccttccaacttcatcaaggagctgtcaggggagtcggatgagcttggcatttcccaggatgagcagctatccaagtcaagtttaagggaaaccacaggctccgagagtgatgggggtgactcaagcagcaccaagtctgaaggtgccaacgggacagtggcaactgcagcaatccagcccaagaaagttaagggagtgggctttggagacattttcaaagacaagccaatcaaactaagaccaaggtcaattgaagtagaaaatgactttctgccggtagaaaagactattgggaagaagttacctgcaactacagcaactccagactcatcaaaaacagaaatggacagcaggacaaagagcaaggattactgcaaagtaatatttccatatgaggcacagaatgatgatgaattgacaatcaaagaaggagatatagtcactctcatcaataaggactgcatcgacgtaggctggtgggaaggagagctgaacggcagacgaggcgtgttccccgataacttcgtgaagttacttccaccggactttgaaaaggaagggaatagacccaagaagccaccgcctccatccgctcctgtcatcaaacaaggggcaggcaccactgagagaaaacatgaaattaaaaagatacctcctgaaagaccagaaatgcttccaaacagaacagaagaaaaagaaagaccagagagagagccaaaactggatttacagaagccctccgttcctgccataccgccaaaaaagcctcggccacctaagaccaattctctcagcagacctggcgcactgcccccgagaaggccggagagaccggtgggtccgctgacacacaccaggggtgacagtccaaagattgacttggccggcagttcgctatctggcatcctggacaaagatctctcggaccgcagcaatgacattgacttagaaggttttgactccgtggtatcatctactgagaaactcagtcatccgaccacaagcagaccaaaagctacagggaggcggcctccgtcccagtccctcacatcttcatccctttcaagccctgatatcttcgactccccaagtcccgaagaggataaggaggaacacatttcacttgcgcacagaggagtggacgcgtcaaagaaaacttccaagactgttaccatatcccaagtgtctgacaacaaagcatccctgccgcccaagccggggaccatggcagcaggtggcggtgggccagcccctctgtcctcagcggcgccctcccccctgtcatcctctttgggaacagctggacacagagccaactccccgtctctgttcggcacggaaggaaaaccaaagatggagcctgcggccagcagccaggcggccgtggaggagctaaggacacaggtccgcgagctgaggagcatcatcgagaccatgaaggaccagcagaaacgagagattaaacagttattgtctgagttggatgaagagaagaaaatccggcttcggttgcagatggaagtgaacgacataaagaaagctctacaatcaaaatgaatacttgatcaatgaaatgtcacattattcatcctgagtccgagactcaaattttctgccccagccaaaataatcttgtgccaaaagattaaaggtttgcctcaaaatgtccctgtttgaaagattagcacaaaagtcttgatagcacaacacaaattccatccaagaggagaatcttccccagggtttagtcctggggctggcactcgttgtgacttacacagagcaaaattgtgctaaaggcttttctactctgagatctcaatgcgaaatgaaaactcaggcagtttagtccatagtggtactattttgatgatattttccattaataaaatgtaatttcagattattcgtttacaagctttataattttatgattttttaatcgtgttttgtcacagacttccctagtgtttgtactacacgtagtcagaagcgagtgtccttttcttttgcttcaggctaagagctgcctcgctctttgtccccccattaggattctattacatatgcaattgtaggttcaacctgtccctttccctgccagcaaaccccaccaccctaagagaaattttagcttatatatgacggtatatttacaaaaagagaaagagaaaatctggtatttgcaatgatctgtgccttctttttaccaccctcttgattggagcttttgtgatgcagctaccatgattcaaaaaaattaaaaattaaaaaaaaaaaatctgccacttatccaagtccactagaggccactgtcttcaaagcttctctcaccctagccaaaggtcctaagaggagacagctgtgaagttgggcgtgctctgtggtaccagctgtgacttttctatttctcctagttttaggttgttcatgaaactagaaatgtcatcctgcttgatttttcatcagccaagttaaacccctgctttctgtcctttgcaccttttgcgtgaacagaatatgcattattaaagcaaaaataaataaaagtaaaatgcaaatgaaaacaaggaaaaaaaaaaaaaaaaaaaaaaaaaaaaaaaaaaaaaaaaaaaa

SEQ ID NO: 12 - DNA, 3300 bp, Homo Sapiens
ggggagaatctggtggatgctggaccttgctgctgctgctactgctgtttccaggggctgcagagcatggactgttaaatcttgcacttcttctgagtgagctgaattcttgccgccaggatggggaaacagaacagcaagctgcgcccggaggtcatgcaggacttgctggaaagcacagactttacagagcatgagatccaggaatggtataaaggcttcttgagagactgccccagtggacatttgtcaatggaagagtttaagaaaatatatgggaactttttcccttatggggatgcttccaaatttgcagagcatgtcttccgcaccttcgatgcaaatggagatgggacaatagactttagagaattcatcatcgccttgagtgtaacttcgagggggaagctggagcagaagctgaaatgggccttcagcatgtacgacctggacggaaatggctatatcagcaaggcagagatgctagtgatcgtgcaggcaatctataagatggtttcctctgtaatgaaaatgcctgaagatgagtcaaccccagagaaaagaacagaaaagatcttccgccagatggacaccaatagagacggaaaactctccctggaagagttcatccgaggagccaaaagcgacccgtccattgtgcgcctcctgcagtgcgacccgagcagtgccggccagttctgagccctgcgcccaccaatcgaattgtagagctgcttgtgttcccttttgattcttctttttaacaatttttttttttttttgccaaacaatatcaatggtgatgccgtcccctgtgcggtctgatgcgccttcctccgtgacgccttcagcctcttttgtcgtggatgcttcgtgggaatgcccagagccccagtgtgcttgtggagagcatggacagacttcgtggtgttcattgtttgatgatttttaatcgttactattatttctttttattctaatgtctctgttctaaaacgtaagactcgggggttggggcaaaagaagggaaacccatccagtcctgtgattctattgcaagcttcaaggggcttttgtttgaaagacaaaactccccacctgggtctgttgtcacacgtgccgtaggggtgatggatggcaccggatgctggattccccaagaacaagttaccctctggggtgaggctattccagcgagctgggacatttccccatgggggcccactcccctctcttccccagcaggctgtagtttctaagctgtgaacatttcaagataaattaacagaggagaggaaaaagatggctcagctattttttcacaggtttacactagttgagctaatatgcgtgtctttggaaattaaacacaaatggtaacatattccaaaaccagacccatcttgttgcctattgtgataaaataaaaagacggctgtatataacatattgggtaatgcagaccaaattaagtgttttgccttgtttaaatgaaatgcatgtttagtgagcactaatacaatcttattccagaagactgtttttagtagcttattgtgaagtaagacaactataatgaatgtctgtcttgtttggaagtcatatctgtctttgcacaaatgtaccaatcgacaagtatattttatatattccataaaaatacaaagtaaccctgactagggcccaactttaattttgaatgcatttccagagtggccatgcctagagggcagatgcagagcaggtggtagtgggacaggacaattggagcacaggaatgttaacatgtatgacaggggaccagtagggtggtttccctctcaggcccagcagcccattgacagcattagactggcggcatggtgcttttctgagcagatcaatactctgcagactcgaaaaaacatcacatacattcttggaacttcccagtggtttaatctatgtgcatggttagggagccaggcctggaatattcagtttccctgcccctgttaaagaatcagaggttgggcagtcatcaaattcatcataaagacatgggcaagtgtgtctgtggtttccaaggcccccctatggagaatccaaaagtattttccattgccgtgctctttgaatgcagacttctatttccagaagtgacagcacaagtctgagttgctgtttggtctggtgacctcagacacactaatttgaattgaaagctaagagtaaaaatttgctggttacaggcgagtcatactcttgcaagtagttagcaaagggaggcccaaattctcaaggttgttgatggggaacttgccactaagagaaggcagagaggtccctagtgggtatatttgctgccaagccacttgccaaagaagaggaaccacagaaagagagacatcatgaccaggagaaaaatgtgactagacatgctaacctccaggtttttatatatgacttgagtctgctgtaattggcagcagaaatccaaatttgtatggtagaccaaaaagaaccaaatccatagggtgaaattttgagacctagactctgtaaaaataatcctagtcttcctccaggggtcagttcctcacagtggttctgtaccaaaacttgccaaattcctccatggccaagtgttaaaatctgtgtttggaaaatagcgaattaacctaagacacagaaggcagactgggtgaggagacctagcatgccctattggcagtgctcaggagctgcatcccacttttccctgctctgaatcgaagtcctagttccttcctttgattctcctttggtaggtggaatcagttaatgttttgagaaacctgcctgggctctgcccttagtcatgacatctcgctgagccagacccactctgttccttggaacctagagctggagtgaggagtagaggtctccggctattccagaaagaaaagtgagccacatgcaggctgatgaatgccgacacttccagaatgtatagaaatagtccctgtcctggcctgccactgaccctgtctgtattttctcggaggttgtttttctccttctccttcccaggaaggtctttgtatgtcgaatccagtgcactcaagtttggccaagggactccacagcacccagaggactgcatgcctcaaggtttatgtcactcctctgctgggctgttcattgtcattgctgtgttcagggacctttggaaataaaacctgttctgtcccaaataaaaccagcctgtgatgttcaagggactggaataaagtggcttacgacctgaaggattctaaaaaaaaaaaaaaaaaaaaa

SEQ ID NO: 13 - DNA, 2897 bp, Homo Sapiens
gcggcttccggcggcgtgacctgaccgcaagaggccaatggagtgtgggagctgaaagggtcttcgctggcggccggtaactggcggcggttgggaacggccgagtgtggctcttctggtgtttcagcttggggagagaggggtggccttcctcttgcagttgaggccggcgccgagccggacttcaggcggatctcgtggcggagcccatcttgctccctctcccaggcctttacccgctccctaggattcccgggccctgtaggtgggagttgggagacgacagtactgcttttaaagagacagtgttagggatcttggaagcacagccaacatgtgtgacattgaagaagccactaaccaactcctagatgtgaaccttcatgagaaccagaagtctgtacaagtgacagaaagtgacctcggaagtgaatctgagcttctagtcactattggagccactgtacctactggctttgagcaaacagctgcagatgaagtcagagagaaacttgggtcatcatgcaaaatcagcagagaccgtggcaagatatattttgtcatttcagtggaaagtctggcacaggttcattgtctgagatcagttgataacttatttgtggtggttcaggagtttcaagattaccagttcaaacaaacaaaggaagaagttctaaaggattttgaagacttggctggaaaactcccatggtcaaaccccttaaaagtgtggaaaattaatgccagttttaaaaagaaaaaagcaaagcgcaaaaagataaatcagaattcaagtaaagagaagattaataatggacaagaagtcaaaatcgatcagagaaatgttaaaaaagagttcactagccatgctttagattctcatatcttagattattatgaaaatccagccatcaaagaggatgtatcaacattaataggtgatgatttggcatcttgcaaagatgagactgatgaaagctcaaaagaagaaactgagcctcaagtgctgaagtttagagtcacatgcaacagggcaggagagaaacattgctttacctcaaatgaggctgcaagagattttgggggtgctgttcaagattattttaagtggaaggccgacatgaccaactttgatgtggaggttcttttgaacatccatgataatgaagtcattgtgggcattgcattgactgaagagagtctccaccgaagaaatataacacattttggacctacaactcttagatcaactcttgcctatgggatgctcaggctctgtgatcctctaccttatgatataatagtcgatccaatgtgtggaactggggcaataccaatagagggggccactgaatggtctgactgtttccatattgctggtgataataatccactggctgtgaatagagcagcaaataacattgcatctttattgaccaagagccaaattaaagaaggcaaaccctcctggggcttgcccatagatgctgttcagtgggatatctgcaatctgccgttgagaactggctctgtggatattattgtaacagatttgccatttggaaaaaggatgggatccaagaagagaaactggaacctttatccagcttgcctacgcgagatgagccgtgtctgcacacctaccacaggccgagctgtactacttactcaagacacaaaatgctttaccaaggcgttatctggaatgcaacacgtatggcgaaaggtggatacagtctgggtgaacgttggtggtcttcgtgctgcagtttacgttctgatacgtacacctcaagcttttgttcatccttcagaacaagacggagaaagaggaactctttggcaatgcaaagaatgaagatgactaatagtacttgtacttcccaccactggaaatgttagcataaaagaacttggagaggaaaaaagtattaacaaaactgcagtctgcactctttaaacctgtttaaggctcttcatcctggttagcaaaaggtgtgaatgtaatgtgatggaatttaaaagttttatgagaccaggcacagtggctcacgactgtaattccagcagtttaggaagccgaagtgtgcagatcacctgaggtccggagaccagcctggccaacatggtgaaaccctgtctctactagaaatacaaaaattagccaggtgtggtggcgggcgcctgtaatcccaactactcaggaggctgaggctagagaatcacttgaacccagcaggcggaggttgcggtgagtcgagatcacgccattgcactccagcctgtgcgacaagagcgaaactctgtctcaaaaagattttataagaaagcagagcttttccttgaagctcttttgaagtggtagcttaattagtattttgttgaaaatactttaaagatgcctagtgaaaagcctactaaagtgctgtgagattggggtttagaacattttattttcaggctttatggcctattttccattgtgtcaagtgcaaaactaccctggcccaaaggaagggcagagaacataattacatcttaggccacatttcattctttgcagctttgctaatccagttgctcaagttctttacctcaacctgaaggaatgaagcattattacattttgtgaatggtgttcagcctataagacgaagtctcacaagacctataggaaagtttaccatctgcctaaatattaaaatatccatctgttattcacattaatacacagaatgaaaatagaggtctaggaattatcaaaggtactgcaaaaatactgtatagaacttatttgtaaatagcacatacattgatagatggggtgtgggaccaacaaaccaaattaaaagaaattgtttttctttcagtacactaaggtgtgtgttttcaaaacc

SEQ ID NO: 14 - DNA, 3328 bp, Homo Sapiens
ctcagctgcagcggcgactttcagtttcatttccacggaccctcctgcctgggccgcagccgccgccgcgatgcccagtaagttcagctgccggcagctccgggaggcgggccagtgtttcgagagtttcctggtcgttcggggactggacatggagacagatcgcgagcggctgcggaccatttataaccgcgacttcaagatcagctttgggacccccgcccctggcttctcctccatgctgtatggaatgaagattgcaaatctggcctacgtcaccaagactcgggtcaggttcttcagactcgaccgctgggccgacgtgcggttcccagaaaagaggagaatgaagctggggtcagatatcagcaaacaccacaagtcactgctagccaagatcttttatgacagggctgagtatcttcatgggaaacatggtgtggatgtggaagtccaggggccccatgaagcccgagatgggcagctccttatccgcctggatttgaaccgcaaagaggtgctgaccctgaggcttcggaatggcggaacccagtctgttaccctcactcacctcttcccactctgccggacaccccagtttgctttctacaatgaagaccaggagttgccctgtccactgggccccggtgaatgctatgaactccatgtccattgtaagaccagctttgtgggctacttcccagccacagtgctctgggagctgctgggacctggggagtcgggttcagaaggagccggcacattctacattgcccgcttcttggctgccgtcgcccacagccccctggctgcacagctgaagcccatgactcccttcaagcggacccggatcaccggaaaccctgtggtgaccaatcggatagaggaaggagagagacctgaccgcgctaagggctatgacctggagttaagtatggcgctggggacatactacccacctccccgcctcaggcagctgctccccatgcttcttcagggaacaagtatcttcactgcccctaaggagatcgcagagatcaaggcccagctggagacagccctgaagtggaggaactatgaggtgaagctgcggctgctgctgcacctggaggaactgcagatggagcatgatatccggcactatgacctggagtcggtgcccatgacctgggaccctgtggaccagaaccccaggctgctcacgctggaggttcctggagtgactgagagccgcccctcagtgctacggggcgaccacctgtttgcccttttgtcctcggagacacaccaggaggaccccatcacatataagggctttgtgcacaaggtggaattggaccgtgtcaagctgagcttttccatgagcctcctgagccgctttgtggatgggctgaccttcaaggtgaactttaccttcaaccgccagccgctgcgagtccagcaccgtgccctggagctgacagggcgctggctgctgtggcccatgctctttcctgtggcacctcgggacgtcccgctgctgccctcagatgtgaaactcaagctgtacgaccggagtctggagtcaaacccagagcagctgcaggccatgaggcacattgttacgggcaccacccgtccagccccctacatcatctttgggcctccaggcaccggcaagactgtcacgttagtggaggcaattaagcaggtggtgaagcacttgcccaaagcccacatcttggcctgcgctccatccaactcaggggctgacctactctgtcaaaggctccgggtccaccttcctagctccatctaccgcctcctggcccccagcagggacatccgcatggtacctgaggacatcaagccctgctgcaactgggacgcaaagaagggggagtatgtatttcccgccaagaagaagctgcaggaataccgggtcttaattaccaccctcatcactgccggcaggttggtctcggcccagtttcccattgatcacttcacacacatcttcatcgatgaggctggccactgcatggagcctgagagtctggtagctatagcagggctgatggaagtaaaggaaacaggtgatccaggagggcagctggtgctggcaggagaccctcggcagctggggcctgtgctgcgttccccactgacccagaagcatggactgggatactcactgctggagcggctgctcacctacaactccctgtacaagaagggccctgatggctatgacccccagttcataaccaagctgctccgcaactacaggtctcatcccaccatcctggacattcctaaccagctctattatgaaggggagctgcaggcctgtgctgatgtcgtggatcgagaacgcttctgccgctgggcgggcctacctcgacagggctttcccatcatctttcacggcgtaatgggcaaagatgagcgtgaaggcaacagcccatccttcttcaaccctgaagaggctgccacagtgacttcctacctgaagctgctcctggccccctcctccaagaagggcaaagctcgcctgagccctcgaagtgtgggcgtcatctccccgtaccggaaacaggtggagaaaatccgttactgcatcaccaaacttgacagggagcttcgaggactggatgacatcaaggacttgaaggtgggttcagtagaagaattccaaggccaagaacgaagcgtcatcctcatctccaccgtgcgaagcagccagagctttgtgcagctggatctggactttaatctgggtttccttaagaaccccaagaggttcaatgtagctgtgacccgggccaaggccctgctcatcatcgtggggaacccccttctcctgggccatgaccctgactggaaagtattcctggagttctgtaaagaaaacggagggtataccgggtgtcccttccctgccaaactggacctgcaacagggacagaatttactgcaaggtctgagcaagctcagcccctctacctcagggccccacagccatgactacctcccccaggagcgggagggtgaagggggcctgtctctgcaagtggagccagagtggaggaatgagctctgaagacacagcacccagccttctcgcaccagccaagccttaactgcctgcctgaccctgaaccagaacccagctgaactgcccctccaagggacaggaaggctgggggagggagtttacaacccaagccattccaccccctcccctgctggggagaatgacacatcaagctgctaacaattgggggaaggggaaggaagaaaactctgaaaacaaaatcttgttctatgcaaaaaaaaaaaaaaaaaa

SEQ ID NO: 15 - DNA, 1602 bp, Homo Sapiens
gacttaggctgtgacccacagaaggacgccagaaagtactcaagacattcacggtgccccggtcagcactcgccatgacgaagacttctacatgcatataccacttccttgttctgagctggtatactttcctcaattattacatctcacaggaaggaaaagacgaggtgaaacccaaaatcttggcaaatggtgcaaggtggaaatatatgacgctgcttaatctgctcttgcagaccattttctacggggtcacctgcctggatgatgtgctgaaaagaaccaaagggggaaaagacattaagttcctaactgccttcagagacctgcttttcaccactctggcttttcctgtatccacgtttgtatttttggcattctggatcctctttctctacaatcgagatctcatttaccccaaggtcctagatactgtcatccccgtgtggctgaatcatgcaatgcacactttcatattccccatcacattggctgaagtcgtcctcaggcctcactcctatccatcaaagaagacaggactcaccttgctggctgctgccagcattgcttacatcagccgcatcctatggctctactttgagacgggtacctgggtgtatcctgtgtttgccaaactcagcctcttgggtctagcagctttcttctctctcagctacgtcttcatcgccagcatctacctacttggagagaagctcaaccactggaaatggggtgacatgaggcagccacggaagaagaggaagtaattgcacaccattttccaagaaccaagaaagaagaaaacacaagagatttttctcatcttttttttttttttttctggtggagggaggtggtggaggaacatagcaaagtaggagggacagagagtgatacttaaatttaataagaggttcgtgaaggtagcttaacttgagaactcttggttttttgaaaggttgactgcacatgccaaaaacaactcctgctatctcagaattaattatctttgaccttcgtggaggatggtctctggttaaaatctgaccaaagaaactcacataaacttggtgttagagaacatctagagagagagagaggaacttagagtcatttaaactcttcagtttacagagaaggatgctgaggacctagatgagaagttacctgcaaaaggcaaaagggttacttagtgtcagaaccaaggcaatgacttctctctcccagatctcctagctactggtcctgggccatttttttttttttaaataatcccaacttttctttaaaagacaagcatttcagtaagctagttattttcatgggttgctcatccatttttttcagtgatctaaaaatgtagggagatggctactactgaagttgtctgtctacttgggataatagcaaattaattgaagacaatgggaaagtaagttataaaaaatactgggaaatctgtttctcttctgagcaagcattcagggcaggtataaacatcaaacatagtgacattgtcaaaacctcttccatttgaacattgattaattcatcaaataaatggtatagtaacaaaaaaaaaaaaaaaaaaaaaaaaaaaaa

SEQ ID NO: 16 - DNA, 1763 bp, Homo Sapiens
gatgcggctgtgattgctgaattgtctgggcaggtttggagtctctggcaagctcccctgactgtgcatccctctggagacgaagaggagggggaggcctgtcctctctgggatccattggtcacatccccctgaggattcccgaatgcctacctccagtgtcgtcaacatggagttctgaagtccatgtggctcttcacagtgaatcaggtgttaaggaagatgcagagacgccacagcagcaacacggataacattccacctgaaagctgtgaccaaggctggcccctctggggaactgggggccattgaacttgaagactgcagagccagcggtccttgggatcccgagaaaccgcagccaggcgctcagctccgaggcgagtgtggatgaaggtggcgtctttgagagtctgaaggcagaggcagcctccccaccagcgctcttctcgggcttatcaggcagcctccccaccagctcgttcccctccagcctggtgctgggctcctcggctggcggcggggacgtgttcatccagatgcccgcgtccagggaggaaggagggggccggggcgaggggggcgcctaccaccaccgccagccccaccaccatttccaccatggcggccaccgcgggggctccctgctgcagcacgtgggtggggaccaccgggggcactcggaggagggaggcgacgagcagcctgggacgcccgcccccgccctgtccgagctgaaggctgtgatctgctggctccagaaaggactccccttcatcctgatcctcctggccaaactgtgctttcagcataagctcggcattgctgtgtgcatcgggatggccagcaccttcgcctatgccaactccacgcttcgagaacaggtctcactgaaggagaagaggtcagtgctggtcatcttgtggatcctggcctttctggcggggaacaccctctatgtgctttatacattcagctcccagcagctgtacaacagcctcatattcctgaagcccaacctggagatgctggacttctttgacctgctatggattgtggggatcgcagactttgttctgaagtacatcaccatcgccctcaagtgcctcatcgtggccctgcccaagatcatcctggccgtcaagtccaagggaaagttctatctggtcatcgaggagctgagccagctgttccgatcccttgtccccatccagctgtggtacaaatacatcatgggtgacgactcctccaacagctacttcctgggcggggtcctgatcgttctctacagcctctgcaagtccttcgacatctgtggacgtgtgggcggagttaggaaagccctgaagcttctctgtacctctcagaactatggagtccgagccaccgggcagcagtgcacagaagctggtgacatctgcgccatctgtcaggccgagttccgagagcctctgattctcctgtgccagatgctgttgaaggggcacaagaaattggagctggagaagattgatgaaagtgcaggtgtgtaaggaaatagaacagtctgctgggagtcagacctggaattctgattccaaactctttattactttgggaagtcactcagcctccccgtagccatctccagggtgacggaacccagtgtattacctgctggaaccaaggaaactaacaatgtaggttactagtgaataccccaatggtttctccaattatgcccatgccaccaaaacaataaaacaaaattctctaacactgat

SEQ ID NO: 17 - DNA, 12227 bp, Homo Sapiens
tgagctgcgaggcccgagagtcagaacctgggggagagggatggtctctgcacgggggggagccggaggagccgccgccgctgccgacgccaccgccgcagccgccgccgccgccgccccggcacccgcctcccggcgctgacggtctcgtacgaagccggcgagggggagccagcagcggcggtcgccggcacgccgcccagcatggtccgggaaaccaggcatctctgggtgggcaacttacccgagaacgtgcgggaagagaagatcatcgagcatttcaaacgatatggccgcgtggaaagtgtcaaaattcttcccaagaggggatctgaaggaggagtggctgcctttgtggattttgtggacatcaaaagtgcacagaaagctcacaactcggtcaacaaaatgggtgacagagacctacgcacggattataatgaaccaggcaccatcccgagtgctgctcggggattggatgatacagtttccatagcatctcgtagtagagaggtttctgggttcagaggaggtggtggagggcctgcttatggtcccccaccgtcacttcatgcacgagaaggacgttatgagcggagacttgatggggcttcagataacagggagcgtgcttatgaacatagtgcctatggacaccatgaacgggggacgggaggatttgatcggacaagacattacgatcaggattactatagagatcctcgagagcggactttacaacatgggctctattacgcttctcggagtcgaagtccaaatcgctttgatgctcatgacccccgatatgaacctagggctcgcgagcagtttacactgcccagtgtggtacacagggatatctacagggatgatattacccgggaggtacgaggcagaaggccagagcggaattaccagcacagcaggagtcggtcaccacattcatcccagtctagaaatcagtctcctcagagactggctagccaagcatctagacccacaaggtcccctagcggcagcggctctagaagtagatcctccagtagtgattcaatcagcagcagcagtagtaccagcagtgacagcagtgattccagcagtagttcaagtgatgattctccagctcgatcagttcagtctgcagcagtccctgcacccacttcccagttgctttcatctctggaaaaagatgagccccgtaaaagttttggcatcaaggtccagaatcttccagtacgctctacagatacaagccttaaagatggccttttccatgaatttaagaaatttggaaaagtaacttcagtgcagatacatggaacttcagaagagaggtatggtctggtattctttcggcagcaagaggaccaagaaaaagccttgactgcatcaaaaggaaaacttttctttggcatgcagattgaagtaacagcatggataggtccagaaacagaaagtgaaaatgaatttcgccccttggatgaaaggatagatgaatttcaccccaaagcaacaagaactctctttattggcaaccttgaaaaaaccactacttaccatgaccttcgcaacatcttccagcgctttggagaaattgtggatattgacattaagaaagtaaatggagttcctcagtatgcgtttctgcaatactgtgatattgctagcgtttgtaaagctattaagaagatggatggggaatatcttggaaataatcgcctcaagctgggttttggaaagagcatgcctacaaactgcgtgtggctagatgggctttcttcgaatgtgtcagatcagtatttaacacgacatttctgccgatatgggcctgtggtaaaggtggtgtttgaccgcttaaaaggcatggccctggttctctacaatgaaattgaatatgcacaagcagctgtaaaagagaccaaagggaggaaaatcggtgggaataaaattaaggtggattttgcaaatcgggaaagtcagctggctttttatcactgcatggagaaatctggtcaagacatcagagacttttatgaaatgttagccgaaagaagagaggaacgaagggcatcctacgactataaccaagatcgtacatattatgagagtgttcgaactccaggcacttatcctgaggattccaggcgggactatccagctcgagggagagagttttattcagaatgggaaacttaccaaggagactactatgaatcacgatactacgatgatcctcgggaatacagggattacaggaatgatccttatgaacaagatattagggaatatagttacaggcaaagggaacgagaaagagaacgtgaaagatttgagtctgaccgggacagagaccatgagaggaggccgattgaacgaagtcaaagtcctgttcacttgcgacgtccacagagtcctggagcgtctccctctcaggcagagaggttgccgagtgattctgagaggaggctttacagccgatcctcagaccggagtggaagctgtagctcactctcccctccaagatatgagaaactggacaagtctcgtttggagcgctatacaaaaaatgaaaagacagataaagaacgaacttttgatccggagagagtggagagagagagacgcttaatacggaaggaaaaagtggaaaaggacaaaactgacaagcagaaacgcaaaggaaaggttcactcccctagttctcagtcttcagaaacggaccaagaaaatgagcgagagcaaagccctgaaaagcccaggagttgtaataaactgagcagagagaaagctgacaaagagggaatagcgaaaaaccgcctggaactcatgccttgcgtggttttgactcgagtgaaagagaaagagggaaaggtcattgaccacactcctgtggaaaagttgaaagccaagcttgataatgacactgtcaaatcttctgccctggaccagaaacttcaggtctctcagacggagcctgcaaaatctgacttgtctaaactggaatcagttagaatgaaagtaccaaaggaaaaggggctttcaagccatgttgaagtggtggagaaggaaggcaggcttaaagccaggaagcacctcaagcctgagcagcctgcagatggggtaagtgctgtggatctggagaagctggaagccaggaaaaggcgctttgcagattccaatttaaaagcagaaaagcaaaaaccagaggtcaagaaaagcagtccagagatggaggatgctcgcgtgctttcaaaaaagcagcctgacgtgtcctctagagaggtcattctgctgagggaaggagaggctgaaagaaagcctgtgaggaaagaaattcttaaaagagaatctaaaaaaatcaaactggacagacttaatactgttgccagccccaaagactgtcaggagcttgccagtatttctgttgggtctggctcaaggcccagctcagacctacaagcaagactgggagaactagcaggtgaatctgtggaaaatcaagaagtccaatcaaaaaagcccattccctcaaaaccacagctcaaacagctgcaggtattagatgatcaaggaccagagagagaagacgttaggaaaaactattgcagtcttcgtgatgaaacacctgaacgtaaatcaggccaagagaaatcacattcagtaaatactgaagaaaaaattggcattgacatcgatcacacgcagagttaccgaaaacaaatggaacagagtcgtaggaaacagcagatggaaatggaaatagccaagtctgagaagtttggcagtcctaaaaaagatgtagatgaatatgaaagacgtagcctcgttcacgaggtaggcaaaccccctcaagatgtcactgatgactctcctcctagcaaaaagaaaaggatggatcatgtcgattttgatatctgcaccaagcgagaacggaattacagaagttcacgccaaatcagcgaagattctgaaaggactggtggttctcccagtgtccgacatggttccttccatgaagatgaggatcccataggctcccctaggctactgtcagtaaaagggtctcctaaagtagatgaaaaagtcctcccctattctaacataacagtcagggaagagtctttaaaatttaatccttatgattctagcaggagagaacagatggcagatatggccaaaataaaactatctgtcttgaattctgaagatgaactaaatcgttgggactctcagatgaaacaggatgctggcagatttgatgtgagtttcccaaacagcataattaagagagatagccttcgaaaaaggtctgtacgagatctggaacctggtgaggtgccttctgattctgacgaagatggtgaacacaaatcccactcacccagagcctctgcattatatgaaagttctcgattgtcttttttattgagggacagagaagacaagctacgtgagcgagatgaaagactctctagttctttagaaaggaacaaattttactcttttgcattggataagacaatcacaccagacactaaagctttgcttgaaagagctaaatccctctcttcatctcgtgaagaaaattggtcttttcttgattgggactcccgatttgcaaattttcgaaacaacaaagataaagaaaaggttgactctgctccaagacctattccatcctggtacatgaaaaagaagaaaattaggactgattcagaagggaaaatggatgataagaaagaggaccataaagaagaagagcaagagaggcaggaattgtttgcttctcgttttttacacagctcaatctttgaacaagattccaagcgattgcagcatctagagagaaaagaggaagattctgacttcatttctggtaggatctatgggaagcagacatctgagggagcaaacagcacaactgattccattcaagaaccagtagttctgttccatagcagatttatggagctcacacggatgcaacagaaagaaaaagaaaaagaccagaaacccaaagaggttgagaaacaggaagatacagagaatcatcccaagaccccagaatctgctcctgagaataaagattcagaactgaaaactccaccttccgttgggcctccaagtgtcacagtcgtaactctagaatcagccccatcagcactagagaagaccactggtgacaaaacggtagaggcgcctttggtaacagaagagaagactgtggagccagctaccgtctcagaagaagcaaagcctgcatctgaacctgctcctgcccctgtggaacagctggaacaagtagacctgcccccaggagcagaccccgataaagaagctgccatgatgcctgcgggtgttgaggaaggttcatcaggtgaccagccgccttatctggatgccaagcctccaactcccggggcctcgttttcccaggcagagagcaacgtagatccagagcctgacagtacccagccactttcaaaaccagctcagaagtctgaggaagccaatgagccaaaggccgaaaagccagacgccactgcagatgctgagcctgatgcaaaccagaaagccgaagctgctcctgagtctcagcccccagcttctgaagatttagaggttgatcctccagttgctgcaaaggataaaaagccaaacaaaagcaagcgttcaaagacccctgttcaggcagctgcagtgagtatcgtggagaagcccgtcacaaggaagagtgagaggatagaccgggaaaaactcaagcggtccaattctcctcggggagaagcacagaagcttttggaattgaagatggaggcagagaagattacaaggactgcttctaaaaactctgctgcagaccttgaacatcccgaaccaagtttgcctctcagccgaacaaggcgccggaatgtaaggagcgtctatgcaaccatgggtgaccatgaaaaccgctctcctgtcaaagagcccgttgagcaaccaagagtgaccagaaagagattggagcgagagcttcaggaggctgcagcggttcccaccacccctcggaggggaaggcctccaaagacacgccggcgagccgatgaagaggaggagaacgaggccaaggaacctgcagaaacactcaagccacctgagggatggcggtcgccaaggtcccagaaaactgcagctggtggtggaccccaagggaaaaagggaaaaaatgaaccgaaggtggatgctacacgtcctgaggccaccactgaggtgggcccccaaataggcgtgaaagagagctccatggaacccaaggctgctgaggaggaggcagggagtgaacagaaacgtgacagaaaagatgctggcacagacaaaaacccccctgaaaccgcccctgttgaagttgtagagaaaaaaccggcccctgaaaaaaactccaaatcaaagagaggaagatctcgaaactccaggttagcagtggacaaatctgcaagtctgaaaaatgtggatgctgctgtcagtcccaggggggctgcagcacaggcaggggagagggaatctggggtggtggcagtctcccctgagaaaagtgagagtccccaaaaggaggatggtttatcatcccagttgaaaagtgatccagttgatccagacaaggaaccagagaaagaagacgtgtctgcctctgggccgtccccagaagccacccagttagccaagcagatggagctggagcaggccgtggaacacatcgcaaagctcgctgaggcctctgcctctgctgcctataaggcagatgcaccagagggccttgccccagaggacagggacaagcctgcacaccaagcaagtgaaacagagctggctgcggccatcggctccatcatcaatgacatttctggggagccagaaaacttcccagcacctccaccttatcctggagaatcccagacagatctgcaaccccccgcaggtgcacaggcgctgcagccttctgaggaaggaatggagacagatgaggctgtatctggcatcctggaaactgaggctgctacagaatcttctaggcctccagtcaatgctcctgacccctcagccggcccaacagataccaaggaagccagaggaaatagcagtgaaacctcacactcagtgccagaagccaaagggtctaaagaagtggaagtcactcttgttcggaaagacaaagggcgccagaaaacaacccgatcacgccgcaagcgaaacacaaacaagaaagtggtggctcctgtagagagccatgtccctgaatccaaccaagctcaaggtgagagtcctgctgcaaatgaggggacaacagtacagcaccccgaagccccacaggaagaaaagcagagtgagaaaccccattccactcctcctcagtcatgtacttctgacctaagcaagattccctccacagagaattcgtcccaagaaatcagtgttgaggaaaggactccaaccaaagcatctgtgcccccagaccttcccccacctccccagccagcaccggtggatgaggagcctcaagccaggttcagggtgcattccatcattgaaagtgacccggtgaccccacccagcgatccaagcatccccatacccacactgccttctgtaactgcagcaaagctctcacctcctgtcgcctctggggggatcccacaccagagcccccctactaaggtgacagagtggatcacaaggcaggaggagccacgggctcagtctactccatctccagctcttcccccagacacaaaggcctctgatgttgacaccagctccagcaccctgaggaagattctcatggaccccaagtatgtgtctgccacaagtgtcacttccacaagtgtcaccacagccattgcagagcctgtcagtgctgccccttgcctacatgaggccccgcccccgccagttgactctaaaaagcctttagaagaaaaaacagcacctccagtgacaaacaactctgagatacaagcctcggaggtgctggtagctgctgacaaggaaaaggtggctccagtcattgctcccaaaattacctctgttattagccggatgcctgtcagcattgacctggaaaattcacagaagataaccttggcaaaaccagctcctcaaaccctcactggtctggtgagcgcactcactggcctggtgaacgtctccctggtcccggtgaatgccctgaaaggccccgtgaagggctcagtgaccacactgaaaagtttggtgagcacccctgctgggcccgtgaacgtcctgaaagggcctgtgaatgttcttacggggccagtgaatgttctcaccactccagtgaacgccacggtgggcacagtgaatgccgccccaggcacagtcaatgccgctgcgagtgcagtgaatgccacagcaagtgcagtgaccgtcacagcgggtgcggttactgctgcatctggtggtgtaacggccacaacaggcacggtgacaatggcaggggcagtgattgcgccgtcaacaaagtgcaaacagagagcgagtgctaatgaaaacagtcggttccacccagggtccatgcctgtgatcgacgatcgtccggcagacgcgggctcaggggcggggctgcgtgtgaacacttctgaaggggttgtgctcctgagttactcagggcagaagaccgaaggcccacagcggatcagcgccaagatcagccagatccccccggccagtgcaatggacattgaatttcagcagtcagtgtccaagtcccaggtcaaacctgattctgtcacagcatcgcagcctccatccaaaggccctcaagctcctgcaggctatgcgaacgtggccacccattccacgttggtactgaccgcccagacatataatgcctctcctgtgatttcgtctgtgaaggccgataggccatccttggagaagcccgagcccattcacctctcggtgtccacgcctgtcacccagggaggcacagtgaaggttctcacccaggggatcaacacaccccctgtgctggttcacaaccagctggtcctcaccccaagcattgtcaccacaaacaagaagcttgctgaccccgtcacccttaaaatcgagaccaaggtccttcagccggccaacctggggtccacgctcacgccccaccaccctcctgctctgcccagcaaactgcctacagaagtcaaccatgtcccctcggggcccagcatcccagcagatcgaactgtctcccatttggcagctgcaaagctagatgctcattctcctcgaccaagtggacccgggccatcctcattcccaagggcaagccaccccagcagtactgcatctacggcgctctccaccaacgccacagtcatgctggctgcaggcatcccagtgccccagttcatctccagcatccacccagagcagtctgtcatcatgccaccccacagcatcacccagactgtgtccctgagccacctctcccagggcgaggtgagaatgaacactcccacgctgcccagtatcacctacagcatccggccagaagcgcttcactctcctcgggctccgctgcagccccagcaaatagaggtcagggccccacagcgtgccagcaccccgcagccagccccagctggtgtgcctgcactggcctcccagcaccctcccgaggaggaagtgcattatcaccttcctgtcgctcgagccacagcccctgtgcagtcagaggtactagtcatgcagtctgagtaccgactgcacccctatactgtgccacgggatgtgaggatcatggtgcatccacatgtgacggcagtcagcgagcagcccagggccgcggatggggtggtgaaggtgccaccagccagcaaggcccctcagcagccagggaaggaagctgccaagacaccagatgccaaagctgcccccacccccacccctgcccccgtccctgtccctgtcccccttcctgcccctgctcctgcccctcatggtgaggcccgtatcctcacagttacccccagtaaccaactccaggggctgcctctgacccctcctgtggtggtgacccatggggtgcagattgtgcactccagcggggagctgtttcaagagtaccggtacggcgacatccgcacctaccaccccccggcccagctcacacacactcagtttcccgccgcttcctctgttggcctgccttcccggaccaagacagctgctcagggccctcctcctgaaggtgagcccctgcagcctcctcagcctgtgcagtccacacagcctgcccagcctgcaccaccctgcccgccctcccagctcggtcagcccggccagccaccaagcagcaagatgcctcaagtgtcccaggaggcaaaggggacccagacgggagtagagcagcctcgcctcccagctggacctgcaaacaggccacctgagcctcacacccaggttcagagggcacaagcagaaacaggcccgacttccttcccctcccctgtgtctgtctccatgaagcctgaccttccagtctctcttcccactcagactgccccaaaacagccgttgtttgtcccaacaacctctggccccagcaccccaccaggactggttctgccacacactgaattccagccagcccccaaacaagattcctctccacacctgacttcccagagacccgtggatatggttcaacttctgaagaagtaccccatcgtgtggcagggcctgctggccctcaagaatgacacagctgctgtgcagctccacttcgtctctggcaacaacgtcctggcccatcggtccctgcccctttctgaaggagggcccccactaaggatcgcccagaggatgcggctggaggcaacgcagctggaaggggttgcccgaaggatgacggtggagacagattactgtctgctgctggctctgccctgtggccgtgaccaagaggatgttgtgagccagaccgagtccctcaaggctgccttcatcacttacctgcaggccaagcaggcggcagggatcatcaacgttcccaaccctggctccaatcagcctgcctacgtgctgcagatcttcccgccctgtgagttctctgagagtcacctgtcccgcctggcccctgacctccttgccagcatctccaacatctctccccacctcatgattgtcattgcctccgtgtgagccactgagtggttatcacctcagtgaatcttcccagggctctgcagtaaaaacaaaggacaacccagccaagcagaggaagaagctgccgaaggggacagactccactgccagacggccagccgtttgctgtcctgccgcccggctcagtcggccagacttcctctaggagtggtgctgctaccttgtatgtttacataatgctttagcccaaggacacatcaccaacccatggactcgcagacaccggggctgggtttctctttcctctttttggagaaaaggaacagggcagtggaatgaaaattttttgtttgtttgtttttaagaaacaagaaaacagaactgcctttgcactaaattagtgacttggacttttgcccagtgaagacaggctgtgacactctggatgtcttggtgtgtgtagacacacattgcagactcttaacgcaggaaggacttcaaacttctgctgagaccttggggtcaaggaacatttcattggttttttttgtccacccccatctcccttgctcatttggatgcgtcaccttaattctcctgctgccaccgtctttgattcaccgggatgtacagtttacagttgaagagcaaacagaaaggttttctcttggtgggatatgcagaacttgggatgtgtgtatatataaatatataatatatataaatatatataatactgacttaaaaaatcaaatcccccgacatacgttttttttaatctgtgccaaaaatgtgttttcagaggaaatcttattttcatattcagactttgtattgcccactcatttgtataagtgcgcttcggtacagcacgggtcctgctcccgcgatgtggaagtgtcacacggcacctgtacaaaaagactggctaacccctcttcctattaccttgatctcttcccccaacttcctaacacttattaatttatgaaactgtttttctcagcgcagttttgttttgtgtgtccattggattacaaactttattaaaaaatataaaacac

SEQ ID NO: 18 - DNA, 5598 bp, Homo Sapiens
ggcccctcagccctgctgcccagcacgagcctgtgctcgccctgcccaacgcagacagccagacccagggcggcccctctggcggctctgctcctcccgaaggatgcttggggagtgaggcgaagctgggcgctcctctcccctacagcagcccccttcctccatccctctgttctcctgagccttcaggagcctgcaccagtcctgcctgtccttctactcagctgttacccactctgggaccagcagtctttctgataactgggagagggcagtaaggaggacttcctggagggggtgactgtccagagcctggaactgtgcccacaccagaagccatcagcagcaaggacaccatgcggcttccgggtgcgatgccagctctggccctcaaaggcgagctgctgttgctgtctctcctgttacttctggaaccacagatctctcagggcctggtcgtcacacccccggggccagagcttgtcctcaatgtctccagcaccttcgttctgacctgctcgggttcagctccggtggtgtgggaacggatgtcccaggagcccccacaggaaatggccaaggcccaggatggcaccttctccagcgtgctcacactgaccaacctcactgggctagacacgggagaatacttttgcacccacaatgactcccgtggactggagaccgatgagcggaaacggctctacatctttgtgccagatcccaccgtgggcttcctccctaatgatgccgaggaactattcatctttctcacggaaataactgagatcaccattccatgccgagtaacagacccacagctggtggtgacactgcacgagaagaaaggggacgttgcactgcctgtcccctatgatcaccaacgtggcttttctggtatctttgaggacagaagctacatctgcaaaaccaccattggggacagggaggtggattctgatgcctactatgtctacagactccaggtgtcatccatcaacgtctctgtgaacgcagtgcagactgtggtccgccagggtgagaacatcaccctcatgtgcattgtgatcgggaatgaggtggtcaacttcgagtggacatacccccgcaaagaaagtgggcggctggtggagccggtgactgacttcctcttggatatgccttaccacatccgctccatcctgcacatccccagtgccgagttagaagactcggggacctacacctgcaatgtgacggagagtgtgaatgaccatcaggatgaaaaggccatcaacatcaccgtggttgagagcggctacgtgcggctcctgggagaggtgggcacactacaatttgctgagctgcatcggagccggacactgcaggtagtgttcgaggcctacccaccgcccactgtcctgtggttcaaagacaaccgcaccctgggcgactccagcgctggcgaaatcgccctgtccacgcgcaacgtgtcggagacccggtatgtgtcagagctgacactggttcgcgtgaaggtggcagaggctggccactacaccatgcgggccttccatgaggatgctgaggtccagctctccttccagctacagatcaatgtccctgtccgagtgctggagctaagtgagagccaccctgacagtggggaacagacagtccgctgtcgtggccggggcatgccccagccgaacatcatctggtctgcctgcagagacctcaaaaggtgtccacgtgagctgccgcccacgctgctggggaacagttccgaagaggagagccagctggagactaacgtgacgtactgggaggaggagcaggagtttgaggtggtgagcacactgcgtctgcagcacgtggatcggccactgtcggtgcgctgcacgctgcgcaacgctgtgggccaggacacgcaggaggtcatcgtggtgccacactccttgccctttaaggtggtggtgatctcagccatcctggccctggtggtgctcaccatcatctcccttatcatcctcatcatgctttggcagaagaagccacgttacgagatccgatggaaggtgattgagtctgtgagctctgacggccatgagtacatctacgtggaccccatgcagctgccctatgactccacgtgggagctgccgcgggaccagcttgtgctgggacgcaccctcggctctggggcctttgggcaggtggtggaggccacggctcatggcctgagccattctcaggccacgatgaaagtggccgtcaagatgcttaaatccacagcccgcagcagtgagaagcaagcccttatgtcggagctgaagatcatgagtcaccttgggccccacctgaacgtggtcaacctgttgggggcctgcaccaaaggaggacccatctatatcatcactgagtactgccgctacggagacctggtggactacctgcaccgcaacaaacacaccttcctgcagcaccactccgacaagcgccgcccgcccagcgcggagctctacagcaatgctctgcccgttgggctccccctgcccagccatgtgtccttgaccggggagagcgacggtggctacatggacatgagcaaggacgagtcggtggactatgtgcccatgctggacatgaaaggagacgtcaaatatgcagacatcgagtcctccaactacatggccccttacgataactacgttccctctgcccctgagaggacctgccgagcaactttgatcaacgagtctccagtgctaagctacatggacctcgtgggcttcagctaccaggtggccaatggcatggagtttctggcctccaagaactgcgtccacagagacctggcggctaggaacgtgctcatctgtgaaggcaagctggtcaagatctgtgactttggcctggctcgagacatcatgcgggactcgaattacatctccaaaggcagcacctttttgcctttaaagtggatggctccggagagcatcttcaacagcctctacaccaccctgagcgacgtgtggtccttcgggatcctgctctgggagatcttcaccttgggtggcaccccttacccagagctgcccatgaacgagcagttctacaatgccatcaaacggggttaccgcatggcccagcctgcccatgcctccgacgagatctatgagatcatgcagaagtgctgggaagagaagtttgagattcggccccccttctcccagctggtgctgcttctcgagagactgttgggcgaaggttacaaaaagaagtaccagcaggtggatgaggagtttctgaggagtgaccacccagccatccttcggtcccaggcccgcttgcctgggttccatggcctccgatctcccctggacaccagctccgtcctctatactgccgtgcagcccaatgagggtgacaacgactatatcatccccctgcctgaccccaaacccgaggttgctgacgagggcccactggagggttcccccagcctagccagctccaccctgaatgaagtcaacacctcctcaaccatctcctgtgacagccccctggagccccaggacgaaccagagccagagccccagcttgagctccaggtggagccggagccagagctggaacagttgccggattcggggtgccctgcgcctcgggcggaagcagaggatagcttcctgtagggggctggcccctaccctgccctgcctgaagctccccccctgccagcacccagcatctcctggcctggcctgaccgggcttcctgtcagccaggctgcccttatcagctgtccccttctggaagctttctgctcctgacgtgttgtgccccaaaccctggggctggcttaggaggcaagaaaactgcaggggccgtgaccagccctctgcctccagggaggccaactgactctgagccagggttcccccagggaactcagttttcccatatgtaagatgggaaagttaggcttgatgacccagaatctaggattctctccctggctgacaggtggggagaccgaatccctccctgggaagattcttggagttactgaggtggtaaattaacttttttctgttcagccagctacccctcaaggaatcatagctctctcctcgcactttttatccacccaggagctagggaagagaccctagcctccctggctgctggctgagctagggcctagccttgagcagtgttgcctcatccagaagaaagccagtctcctccctatgatgccagtccctgcgttccctggcccgagctggtctggggccattaggcagcctaattaatgctggaggctgagccaagtacaggacacccccagcctgcagcccttgcccagggcacttggagcacacgcagccatagcaagtgcctgtgtccctgtccttcaggcccatcagtcctggggctttttctttatcaccctcagtcttaatccatccaccagagtctagaaggccagacgggccccgcatctgtgatgagaatgtaaatgtgccagtgtggagtggccacgtgtgtgtgccagtatatggccctggctctgcattggacctgctatgaggctttggaggaatccctcaccctctctgggcctcagtttccccttcaaaaaatgaataagtcggacttattaactctgagtgccttgccagcactaacattctagagtattccaggtggttgcacatttgtccagatgaagcaaggccatataccctaaacttccatcctgggggtcagctgggctcctgggagattccagatcacacatcacactctggggactcaggaaccatgccccttccccaggcccccagcaagtctcaagaacacagctgcacaggccttgacttagagtgacagccggtgtcctggaaagccccaagcagctgccccagggacatgggaagaccacgggacctctttcactacccacgatgacctccgggggtatcctgggcaaaagggacaaagagggcaaatgagatcacctcctgcagcccaccactccagcacctgtgccgaggtctgcgtcgaagacagaatggacagtgaggacagttatgtcttgtaaaagacaagaagcttcagatggtaccccaagaaggatgtgagaggtggccgcttggagtttgcccctcacccaccagctgccccatccctgaggcagcgctccatgggggtatggttttgtcactgcccagacctagcagtgacatctcattgtccccagcccagtgggcattggaggtgccaggggagtcagggttgtagccaagacgcccccgcacggggagggttgggaagggggtgcaggaagctcaacccctctgggcaccaaccctgcattgcaggttggcaccttacttccctgggatccccagagttggtccaaggagggagagtgggttctcaatacggtaccaaagatataatcacctaggtttacaaatatttttaggactcacgttaactcacatttatacagcagaaatgctattttgtatgctgttaagtttttctatctgtgtacttttttttaagggaaagattttaatattaaacctggtgcttctcactcac

SEQ ID NO: 19 - DNA, 1730 bp, Homo Sapiens
gcgggccccggctcgctagccgtcctgcgggacgccggcgctgatgggaaatccagttatcaaaattgactcaagaagagagaacctaacagaacaataacaatggaagaaattgggaacattatcacaaagctatcatcctgccaaactccaggctcagatgtcacaggttaaaaaaagtccttcatgaaaaagaaagatcttaagcagcatgatggattcagaagctcatgaaaagaggccaccaatactaacatcttcaaaacaagatatatcacctcatattacaaatgttggtgagatgaagcattacttgtgtggctgctgtgcagccttcaacaatgtcgcaatcacatttcccattcagaaggtcctctttcgacaacagctgtatggcatcaaaacccgggatgcaatacttcagttgagaagggatggatttcgaaatttgtatcgtggaatccttcccccattgatgcagaagacaactacgcttgcacttatgtttggtctgtatgaggatttatcctgccttctccacaagcatgtcagtgctccagagtttgcaaccagtggcgtggcggcagtgcttgcagggacaacagaagcaattttcactccactggaaagagttcagacattgcttcaagaccacaagcatcatgacaaatttaccaacacttaccaggctttcaaggcactgaaatgtcatggaattggagagtattatcgaggcttggtgcccattcttttccggaatggactcagcaatgtcttgtttttcggccttcgaggtcccattaaggagcatctgcctaccgcaacgactcacagtgctcatctggtcaatgattttatctgtggaggtctattgggtgccatgttgggattcttgttttttccaattaatgttgtaaaaactcgcatacagtctcagattggtggggaatttcagtctttccccaaggttttccaaaaaatctggctggaacgggacagaaaactgataaatcttttcagaggtgcccatctgaattaccatcggtccctcatctcttggggcataatcaatgcaacttatgagttcttgttaaaggttatatgaaaaaaccatcagttaagtgccatttatcaactgaatagaccttctaagaagaatgcagtttggcctcttttttttttttttttaaaggaaatcccaatcttattatggaaagccatcaactgggtgtggggagtaggtcagagggttagtgaaagtccaggggatttctcctccaagtcctaccacacaaaggaaagtctcaagcctctattcaccccttctcaatcctcacaaaatagggggttgttcaatattgtcttcaatgataaaaactttgtggttaaaagtttctccttaggactagtgacaaagttaggcttatacttttttttttttttgaggcagagtcttgctctgttgcccaggctggagtgcagtggcgcgatcttggctcactgcaacctccgcctccagggttcgggcaattctcctgccttagcctcctgtagtcctagctgctcgggaggctgaggcaggagaatctctttcttaattggccaaatataagttggtgtcgtaactccaggccacagtgagttatgggcaaagcttttttccttaagcatcaacaaaataggataaaaggttccaataggaaaaaaaaaaaaaaaaaaaaaaaaaaaaa

SEQ ID NO: 20 - DNA, 1074 bp, Homo Sapiens
tggaagcggcactcaagatgctgcgccgcgaggcccgcctgcgccgcgagtacctgtaccgcaaggcccgggaggaggcgcagcgctcagcccaggagaggaaggagcggctgcggcgcgcgctggaagaaaaccgcctgattcccactgagttacgccgagaggctctggccttacaggggtccctggagtttgatgatgctggaggtgaaggtgtgaccagccacgtggatgatgaataccgatgggcaggagtcgaggatcccaaggttatgatcactacctcccgagaccccagttcccgcctcaagatgtttgcaaaggagctgaagctggtgttcccgggcgcccagcgaatgaaccgaggtcgacatgaagtgggggcactggtgcgagcctgcaaagccaacggcgtcaccgatctgctggtcgttcacgagcatcggggcacacctgtggggctcatcgtcagccacctgccctttggtcctactgcctacttcacgctgtgcaatgtggtcatgcggcatgacatcccagacctgggcaccatgtcggaggccaagccccacctcatcacacacggcttctcctcccgcctgggcaagcgggtctctgacatcctccgatacctatttcccgtgcccaaagatgacagccaccgggtcatcaccttcgcaaaccaggacgactacatatcattccggcaccatgtgtataagaagacagaccaccgcaacgtggagctcactgaggtcgggccccgctttgagctgaagctgtacatgatccgtctgggcacgctggagcaggaggccacagcagacgtggagtggcgctggcacccttacaccaataccgcacgcaagagagtcttcctgagcaccgagtgagcacactcaccactcagtcaggacatggacttggaactcaggatggggctgtcatagacagacccaccagtaggaactgtcacagaatggcctgctgaactgggatgtggaactgtggcgggtggagaggtctgaataaaccgtctgtgtcatggcaaaaaaaaaaaaaaaaaaaaaaaaa

SEQ ID NO: 21 - DNA, 1235 bp, Homo Sapiens
ggggggggggggcacttggcttcaaagctggctcttggaaattgagcggagagcgacgcggttgttgtagctgccgctgcggccgccgcggaataataagccgggatctaccatacccattgactaactatggaagattataccaaaatagagaaaattggagaaggtacctatggagttgtgtataagggtagacacaaaactacaggtcaagtggtagccatgaaaaaaatcagactagaaagtgaagaggaaggggttcctagtactgcaattcgggaaatttctctattaaaggaacttcgtcatccaaatatagtcagtcttcaggatgtgcttatgcaggattccaggttatatctcatctttgagtttctttccatggatctgaagaaatacttggattctatccctcctggtcagtacatggattcttcacttgttaagagttatttataccaaatcctacaggggattgtgttttgtcactctagaagagttcttcacagagacttaaaacctcaaaatctcttgattgatgacaaaggaacaattaaactggctgattttggccttgccagagcttttggaatacctatcagagtatatacacatgaggtagtaacactctggtacagatctccagaagtattgctggggtcagctcgttactcaactccagttgacatttggagtataggcaccatatttgctgaactagcaactaagaaaccacttttccatggggattcagaaattgatcaactcttcaggattttcagagctttgggcactcccaataatgaagtgtggccagaagtggaatctttacaggactataagaatacatttcccaaatggaaaccaggaagcctagcatcccatgtcaaaaacttggatgaaaatggcttggatttgctctcgaaaatgttaatctatgatccagccaaacgaatttctggcaaaatggcactgaatcatccatattttaatgatttggacaatcagattaagaagatgtagctttctgacaaaaagtttccatatgttatgtcaacagatagttgtgtttttattgttaactcttgtctatttttgtcttatatatatttctttgttatcaaacttcagctgtacttcgtcttctaatttcaaaaatataacttaaaaatgtaaatattctatatgaatttaaatataattctgtaaatgtgaaaaaaaaaaaaaaaaaaaaa

SEQ ID NO: 22 - DNA, 6961 bp, Homo Sapiens
atggcaggaaacagccttgttctacccattgttctttggggtcgaaaagcgcccacacattgcatctcagccgtacttttaacagatgatggggccacgatcgtaacaggatgtcacgacggacaaatatgtctctgggatctttcagtagaactgcaagttaatcctcgagcactgttgtttggtcatacagcatcaatcacttgtttgtctaaagcttgtgcttccagtgacaaacagtatattgtgagtgcatctgaaagtggagagatgtgcctctgggatgtgagtgatggcagatgtattgaatttacaaaattagcttgcacacatactggcatacagttctaccagttctctgttgggaatcagcgagaaggaaggcttttatgccacggacattaccctgaaatccttgttgtggatgctaccagccttgaagtattatactccttagtatcaaagatatcaccagactggattagctccatgagtattattcgatcccaccgaacacaagaggacacagtggtagcactctcggtgactggcatcctgaaggtctggattgttacctcggaaataagtgacatgcaggatactgagccaatatttgaggaggaatccaaaccaatttattgtcagaattgccaaagcatctctttttgtgcatttacacaaaggtcacttttggttgtgtgttccaaatattggagggtgttcgatgccggagactattccttgttgtgttcaggtcctagtgaaaatggacagacatggaccgggggggactttgtctcatcagataaagtcatcatttggacagaaaatgggcaaagttatatttacaaactacctgccagttgccttccagctagtgattcattccgcagtgatgtggggaaggcagttgaaaatttaattcctcctgtacaacatatcctcttggatcgaaaagataaagagttgctaatttgtcctcctgttactcggttcttctatggatgcagagaatatttccataaactgttaattcagggtgattcttctggaaggttgaatatttggaacatatcagacacagctgataaacagggaagtgaagaagggctggcaatgacaacttctattagtttgcaagaggcatttgataaactgaatccttgtcctgctggaattatagatcagctgagtgtgattcccaatagtaatgaacctcttaaagtaactgcaagtgtgtacataccagcacatggacgacttgtttgtggtcgtgaagatggaagcatagttattgtacctgccacacagacggccatagtacagctgttgcaaggggaacacatgctcagaagaggttggccacctcacagaacactccgtggtcatcggaacaaagtcacatgtttgctatatcctcatcaggtctcagctcggtatgatcaaagatacctgatatctggaggtgtggatttttcagtcataatttgggacatattttctggagaaatgaaacatatcttctgtgttcatggtggtgagattactcaacttctagttccacctgaaaactgtagtgcaagagtacagcactgcatctgctctgtagccagtgaccactcagtaggacttctaagtttgcgagagaaaaaatgcataatgttggcatctcgtcacctttttcctattcaagtaatcaaatggaggccttctgatgattacctggtggtggggtgttcagatggttctgtgtacgtctggcaaatggatactggtgcattggatcgttgtgtgatggggataacagcagttgagattctaaacgcttgtgatgaagctgttcctgctgctgttgattcacttagtcatccagcagtcaacctaaaacaagctatgacgagacgtagtcttgctgctcttaaaaatatggcccatcataagctacaaacccttgcaactaacctcttggcttctgaggcatctgacaagggaaatttacctaaatattctcataactccctgatggttcaagcaataaagacaaacctaacagacccggacatacatgtgctattctttgatgtggaagcgttgattattcaactcctgactgaagaagcctctaggccgaatactgctcttatttccccagagaatttgcaaaaagcatctggcagttcagacaaagggggctcttttttaactggaaaacgagcagcagttctcttccaacaagtgaaagaaacgatcaaagagaacatcaaggaacacctccttgatgatgaagaggaggatgaggagataatgaggcagagaagggaagaaagtgatcctgaatatcggtccagcaaatcaaagccattgaccctattagaatataatttaactatggacactgcaaagctgtttatgtcctgccttcacgcctggggtttgaatgaagtactggatgaagtttgcctggatcgccttggaatgctgaaaccccactgcaccgtatcgtttggcctcttgtcaagaggaggccatatgtcactgatgctgccgggttataatcagcctgcttgtaaactgtcacatgggaaaacagaagtaggaaggaagctgccagcgtctgagggagtaggaaagggaacttacggagtgtcccgtgccgtcaccacacagcatctcctgtctatcatttctttggcaaatactttaatgagtatgaccaatgcaacttttattggtgatcatatgaagaagggtcctaccaggccacctagaccaagcaccccagacctttctaaggcaaggggttcccctccaacttccagtaatattgtgcaaggacagattaaacaaggttggagtcagttagctgctatgcactgtgttatgctgccagacctactgggattggataaatttaggcctccccttctggagatgctggcccgaagatggcaagatcgatgcttggaggtgagagaagccgcgcaggccctgcttctggcggaactgagaagaattgagcaggcaggcaggaaggaagccattgatgcctgggctccttacttacctcagtacatagaccacgtcatatcacctggagtcacatcagaagccgcgcagactatcaccacggctcctgatgcctcagggcctgaagcaaaagtccaggaggaagagcatgaccttgttgacgatgacatcaccactggttgcttatcaagtgtcccacaaatgaaaaaaatttctacatcttacgaggaaagacggaagcaagctaccgctattgttttacttggagtaataggagctgaatttggtgctgaaattgaacctcctaaactattgaccagacctcgaagctctagccaaattcctgagggattcgggttgactagtggtggatccaactactcgctggccagacatacttgcaaggcactgacgtttcttctgctacagcctccaagccccaaacttcctccacacagcactatccgaagaacagccattgatctgattggacgtgggttcactgtttgggagccttacatggatgtgtccgctgttctgatggggcttctcgaactttgtgccgatgccgagaaacaacttgccaacatcacaatggggttgcctctgagcccagcagctgactcggcccgctctgcgaggcatgccctctcgctcattgccaccgccagaccacccgccttcatcaccaccatagccaaagaggtacacagacatacggctcttgcagcaaatacccaatcacagcagaatatgcacacaacaactcttgcacgagctaaaggggaaattttgagagtcattgaaattcttattgaaaagatgcccacagatgttgtggatcttctcgtggaggttatggacatcattatgtactgccttgaaggatctttagttaaaaagaaaggtcttcaagaatgtttcccagccatctgcaggttctacatggtcagctattatgagcggaatcacagaatagcagttggagctcgccatggttcagtggccctgtacgacatccggactggaaaatgtcagacaatccatggacacaagggaccaatcactgcagtggcttttgctcctgatggaagatatcttgccacctactcaaacactgacagccacatttctttttggcagatgaacacgtcactgctgggaagcatcggcatgctgaactcggcacctcagctgcgctgcattaaaacctaccaggtgccccctgtgcagcccgcgtcccccggctcccacaatgccctcaagctggcccggctcatctggacttccaaccgcaacgtcatcctcatggcccatgacgggaaggagcaccgcttcatggtctaatgctgctgcctgccgccgtgactgcgttttagttctctaaattatccaagccgatgttgctctgtccttcctcacaccagattgttcccaggggcctgcccaccccagtgccatccagtggcacggccggccgggtcttgtcacttgtgcatgcttctcaggggcagaacccgctcgtgccatctgtcgattcagaggcacgcacacatgctctgcaggatgtggccatcctgtcaccaggtagtttttccctgccagagatggcaggggaaagccagcggttcctgggaacgctcttgttgcttggtgcaacagaagcacaaaaatcaataaacactgtgattgcactcccagcccagatcagcatttttagccatctcaaccgcacctctgaagtgctgcttgaatctggccgttctgacactgggtgttgaggtcatgtggcagtcctcacgattgaaattattgccctttgaattacctaaaatattgtttaccaaaaagattctgtgtttacatgttcttttcttctggtgattgctaggaaattactcaatccaatttcctagggtttagctaccaccttctttatcaacagctaaccaatttgagattcatgattaattatgtacacaaaaatattttccttgtagaaaatagttttccagacacttagccttctgaagtgctcatctcttgcttaaatgatagtctatttagtagtttaaaataaaaataatcactccctatgatctagttaatgtaattatccagtcactgtaactaatctcttgaagggacttttgtgataaagagccaagttcagaagcatagcgtgtaccgaaaatgaagactctcctatctactgctacagatcctgttgaagaaagagcttacccctttcccccggaaaacttgcaatcctgtagttcccatatgtgtggcatatgtcagttatgaaattattataattcagccttcaaactactactgatcaactaaaggaaagctaataaggtatttcttttaaacaagtattctggaaaagtaataactatggcacaaatgttcaggagtgtatataaaaatatgtgggctctcgatttatttgagcaaacattgcaatgagggtgttcattatgcttctaagtaagctttaactagaccactttcttcttatgtcagattgtgctggttctagctcataataatgaaaaaaatagaattatattttgtatgaattgtttctaacaaaccttgatctgtatatacttgtgaggggttgtttggttgcctaattgttgattggttggttagttgggcaaaatcatttattacatgcaaaaatagaaaattatttgttaaattcagagaaaatatgtgaagtttacaaaggaaccaaaatgataatgggagaatttagtcttaaaagtttaggttgtcagagtttatctgatatacaaaaaagtaggatcaaagtctaggaacaaacattggttatttcactgaaacagatttttaaagagcatattaagaaattaagaccattagatcatctctttcataatgatatgatgttatttccattgacggcaaatctatactgttccttggttttagagttgggtattctttcaaaagtgaatttaggcacatgcatgtacattgtatttataaagattatatatgtagtttccaaggaagaaacaaagacctatacagtttagactttatttgtttggtgaacgtgctgttgtgtttggcatagctagagaaatgtaaggtaaaaggctcactttgttttccagtgggtccagagtcttctctatacccaacatatgtttactttatgaacttaaatggaaattaatttattgtagactacatctctatttggaatgatgaggtaaatgtataccttagcattttctttaacaaaaatgttctgtgtgtcaggaaagaggtgtgagagcggtaggcagcctgccgcaaacacacggatggctccccccgccacgaaggttgagaacaaagccagggggcccagaggagcaatagccctgggccacaagcgtgggtaggcctttcacgtattccgtctgcacaggcaaccaaggccagtagaaagctatggctgcaaaaccctggggtggacgatgtttgatgattagacggtcatctctaactactaaactaatatctgcattcttgttaacataaatctctccttggctattttaatagccacagtcccaaacttcatcccagcttagatttctcagcactgaggtaaactctgcattgtcatcccagcgtacacctttaatgttttattgattttactggcactgtatttggacctgtccttgtatatgtagagacatatgtggcttcattggtaatttacaagcaaaagatgacatgacgtgacacctgtatgaaaatgtgatgattgaactccctgtgtacagcgagtgaattaaaatgtctgcctctccagacatttcttaatgattccacttaatagactctatgtgtgctgaatgttcctgtgtacatatgtgtgttaaataaaacaattgtattg

SEQ ID NO: 23 - DNA, 1578 bp, Homo Sapiens
gcgacgcgccgaggtactaggcagagccgtggaaccgccgccaggtcgctgttggtccacgccgcccgtcgcgccgcccgcccgctcagcgtccgccgccgccatgggagtgcaggtggaaaccatctccccaggagacgggcgcaccttccccaagcgcggccagacctgcgtggtgcactacaccgggatgcttgaagatggaaagaaatttgattcctcccgggacagaaacaagccctttaagtttatgctaggcaagcaggaggtgatccgaggctgggaagaaggggttgcccagatgagtgtgggtcagagagccaaactgactatatctccagattatgcctatggtgccactgggcacccaggcatcatcccaccacatgccactctcgtcttcgatgtggagcttctaaaactggaatgacaggaatggcctcctcccttagctccctgttcttggatctgccatggagggatctggtgcctccagacatgtgcacatgagtccatatggagcttttcctgatgttccactccactttgtatagacatctgccctgactgaatgtgttctgtcactcagctttgcttccgacacctctgtttcctcttcccctttctcctcgtatgtgtgtttacctaaactatatgccataaacctcaagttattcattttattttgttttcattttggggtgaagattcagtttcagtcttttggatataggtttccaattaagtacatggtcaagtattaacagcacaagtggtaggttaacattagaataggaattggtgttggggggggggtttgcaagaatattttattttaattttttggatgaaatttttatctattatatattaaacattcttgctgctgcgctgcaaagccatagcagatttgaggcgctgttgaggactgaattactctccaagttgagagatgtctttgggttaaattaaaagccctacctaaaactgaggtggggatggggagagcctttgcctccaccattcccacccaccctccccttaaaccctctgcctttgaaagtagatcatgttcactgcaatgctggacactacaggtatctgtccctgggccagcagggacctctgaagccttctttgtggccttttttttttttcatcctgtggtttttctaatggactttcaggaattttgtaatctcataactttccaagctccaccacttcctaaatcttaagaactttaattgacagtttcaattgaaggtgctgtttgtagacttaacacccagtgaaagcccagccatcatgacaaatccttgaatgttctcttaagaaaatgatgctggtcatcgcagcttcagcatctcctgttttttgatgcttggctccctctgctgatctcagtttcctggcttttcctccctcagccccttctcacccctttgctgtcctgtgtagtgatttggtgagaaatcgttgctgcacccttcccccagcaccatttatgagtctcaagttttattattgcaataaaagtgctttatgccggcttttctcaaaaaaaaaaaaaaaaaa

SEQ ID NO: 24 - DNA, 1052 bp, Homo Sapiens
gcgcgtccgtagtggcggctggcgctagggaactgcagggtctagggtgttgttggagtggcagttggtccgaatttctcccgaagcccgcggaggagcgggtaagagccccgcgaatccggccccaacctcgggaacgggatgggaggcggccctggccgcaagccccgcgctgctagcgggtccaccgcgtcgtagccgacagccgcccttcttcctcgcagcgcgccgcgattcaccagcctggtcccttctgcggagagcgatgccgcttcccgacaccatgttctgcgctcagcagatccacattcccccggagctgccggacatcctgaagcaattcaccaaggctgccatccgcacccagccggccgacgtgctgcggtggtccgcgggctatttttcagctctgtcgagaggagatccacttcctgtaaaggacagaatggaaatgcccacggcaacccagaaaacagacacaggcctgactcaaggactcctgaaagttttgcacaagcagtgtcaccacaagcggtatgtggaattaacagatcttgagcagaagtggaagaacttgtgcctgccgaaggaaaaattcaaagcgctcttacaactggatccttgtgaaaacaaaatcaagtggataaactttttagcgcttggatgcagcatgcttggtgggtccttgaacactgcgctgaagcacctgtgcgagatcctcacggacgatccggagggcgggcccgctcgcatccccttcaagacgttttcctacgtttaccgctacttggccagattagactcagatgtgtctcccttggagacggaatcctaccttgcctctctaaaggaaaatatagacgccaggaagaacggcatgataggtctttcagatttcttctttccaaagaggaaacttttagaaagcattgaaaactctgaagatgtaggccattaatacagagaagaatacattttaatgtcaaaatagtgctctttaaaattctggcaccaaatacaacttaccctgaatcacaaaaaaaaaaaaaaaa

SEQ ID NO: 25 - DNA, 12395 bp, Homo Sapiens
cgctgcaagtcccggggccctgcctccatcgtcctaggggttccgcgggcaggagcaacccagaagcaccggtgaggccagcgcgtcctcgcagccatgagcagtgagcaggataaatcggccagcaaagaaaaatccaagaaaccagtaagatttctaccacagctgtctatggagaaattagccagcaaagaaaagttcaaggcaccagcaagagctttaccacagctgtctatggtgagtacaaagccccactggcagcaggcagctccatcattccatttgagtgtaaagcaggatgatgagagtccagaaccatttagtgttaaaaatgaacagtcccatgctgaatacatggaacgttttggaaaaaagggcaaattaccccaccaagttgatgatagttatgttggaccatctacttccaaatcaaagggcaaatctccacataaagaacgagaaaactttagaagtactcttgttaatgtcattatgcaacaagatgctgacttagactcagctgtccctgatggaagcacaattccaaaaccgaccgcttctgctatagagaaagacatcttgagatattactattatattcaccatggaattgatacagaccatgtagccccaatggaagattcttggctagaacacgtactggatttagttccacaacatctgaaagtcttcactgacagcatagttacattatctgatgaaatgagagaggattatcttcttagtgtaaggaaatccatagttgattttgttttaaaagatcctcgagagaaaggagatgataagaagacagatgaacttccagcccatcgtgctgaaatggaaattctgccaaaaccttggaggaaatcttttttagctgcaagcagttatattagggatcacttgaatgcaatgaaccccacaatgctggctgtactagatttgtggcacactaattttaaaaaattacgtttagttgatatcaaagaatttcataattgccaggatgcattagagctgtcaagttttcagaacattatcatgagacacatggactctgccaaagagactctacttaaaatgtggtttccagaagtgcagaatatttattaccaaggtaataaaaaaaagcaattgccaactggtgacagcagtgccaaattggaatcttttttcaactgtgctgctgcacttatgactttacagctgcaggacctcactttagtctccatgcaagatttcacggacttaattgcacaacccccagattctgttagagcttttgaacatccaggtttcatcatgaggctgattcttgataatgacaccattaagtttgaacctgagttgagtgactatatagatatctttctaaatgtttatgacgtcatgattaaagctgtcagttttgtgccaagagttgagacaaaattgtattccaagtgggaaagtaagtctaaaccaacaaccttgaagcccataattctgaatgaaattgtagatgctcacaaagaaaagatcaaggaagttattatgaaagagagtgtggcacctactgagcacctcagactctatgacaagtatgactttttaattaccagaaaagctgagcgagatgttgataacttcctcgcagaaaatcatagttatgaaaaaataatagatgaaatttgcaaataccagaaactaatagaggaaatacagtacacatccataaagactattcgtttaggaatgtttgaaatgcactgtgaggaattaatcagagctttggtgaagcgagcagatattatttgtgggaaacttctagctaaaatgttcagagatcatcaggaagtaaatacaagattatgcgatgaatttgagaggatagctgaaaaagctcttagcactcctccaaatacagcagaactaatggaaatgaaggcttacattcagaaagtggaggtaactgatatgattgaactagaacagagattagtggattccaaaaactgcctcgccttcctcatcgagtatgtcaacttttctccagcagacatgaggctaaataatagtgttttccagtggtatggaaggatgggagaaatttttgaagaacacaggaaaatcattaaagagaaaatagaacaatatcaagaaggtctgaagttacggtgtgaacggtttgtggaggaattggagagttatgctaagcaatcagaagaattttattcatttggagatcttcaggatgttcagcggtacctaaaaaaggctcaaatactgaatggaaagttggatttagctgcagataagattgagcagtttaatgctgaagaggaagcatttggttggctaccatctgtatatcctcaacgtaaaaaaatccaagatggcttgaacccttatcttcgtctttatgaaactgctgtcgaatttagcagcaactatagagcatggacagaagggccatatcataaagtgaatccagaccaagtagaagcagatattggaaattactggagaggattatataaactggagaaaacctttcatgattctccatatgcattggcaatgacaaaaaaagtaagatcaaaggtggaagatttcaagcagcacattcctctcattcaagtgatctgtaatcctggtttgcgccccaggcactgggaggccatgtctgccattgttggttaccctttgcagccatcagatgactccacagtctcctcttttttagacatgaatctggaaccatatatagaccgatttgaaggtattagtgaagcagctagcaaagaatattctcttgaaaaggcgatggagaagatgattactgagtgggatgcagtggaatttgtcatccattcttatagagaaactgggacatttattttggcatcagttgatgaaattcagatgttgttggatgaccatattattaaaacacaaactatgcgaggatctcctttcattaagccttatgaaaaacaaatgagagaatgggagggcaagctcctactgcttcaggagattctggatgaatggctcaaagtccaagccacgtggctgtatctggagcccattttcagctctccagacattatgtctcaaatgcctgaggaaggcagacgatttacagctgtggataagacatggagagatataatgagaagtgtcatgcaggataaacatgttctgacagttgtaaccattgacagaatgctggaaaggctgaaaaaatctaatgaacttttggagctcattcttaaaggacttaatgaatatttggaaaagaaacgcctctttttccccagattcttttttttgtccaatgatgaacttcttgagatactatctgagactaaagatcccactagggtgcaacctcacttgaagaaatgttttgaaggaatcgcaaaggtagaatttacggaaactttagacattactcacatgaagagcagcgaaggagaggttgtagaactcatagagattatttcaacagccaaagccagaggtcaagtggagaagtggttggttgaattagagagagttatgattaactccatccacaaggtaactggagatgcaacttttgcctatacaaaatatgaacgaattaactgggtaagggattggcctggacagactgttctctgtgtatcccaaatcttttggacaaaagaagtacaaacagctattccaatggggataaaggctcttgagcaatacttgaaaacatgtaacagacaaattgatgatattgtcactttggtgcgtggcaaattgtccatgcagaatcgcgtaactctgggagcacttgtggtactggatgtccatgctagagatgtcctctcatcacttgtaaaaaaaaatattagcgatgactctgactttgaatggttaagtcagcttaggtactactggcaagaaaatcatttagaaacaaaaatgatcaatgctggtttgcgatatggatatgaatatctgggtaattcccctaggctggttattacaccactcacggatagatgttacagaaccttatttggagcccttcatttgcaccttggaggagcacctgagggtccagctggcactgggaagactgaaactaccaaggatttggcaaaagctgtagccaaacaatgtgttgttttcaactgctctgatgggttggattatttggctttgggaaaattctttaagggactgttatcttgtggagcctgggcttgctttgatgagtttaacagaattgatttggaagtactctctgtggttgctcaacaaatccttactatccaaagaggtattaatgcaggtgctgatatactgatgtttgaaggaactgaactaaaacttgaccccacatgtgctgtctttataacaatgaaccctgggtatgctgggcgatcagaactgccagataacctgaaggctctctttcggacagtagcaatgatggtacctgactatgccatgattgctgaaatagtcctatactcctgtgggtttgtcactgctcgaccactgtctgtaaaaattgtggctacgtatcgcttgtgttcagagcagctgtcatctcaacatcactacgactatggaatgagagccgtgaagtcagttcttactgctgctgggaatctgaagctgaaatatccaaatgaaaatgaagaaattttgctgcttagatctatcattgatgtaaatctgccaaaatttttatcccatgatttaccactctttgagggaattacttcggatttgtttcctggggtaaaattaccaaaaccagattacaatgatttgctggcagctatcaaagacaattgtgcctccatgaatttgcaaatgactgcattcttttccgagaagattcttcaagtatatgaaatgatgattgtgcgtcatggttttatgattgttggagaaccatttggaggaaaaactagtgcatatcgtgtcttagctggagcactaaatgatatatgtgaaaaggggctaatggaagaaaacaaagttcaaataactgttttaaatcctaagtctgtcaccatgggccaactgtacggacagtttgattcagtgtcccatgaatggtctgatggggtccttgctgtcagttttagagcatttgcctcttcagtgactccagataggaaatggttaatttttgatggcccagtagatgcagtgtggattgagaatatgaacactgtgctggatgacaacaagaagctatgtctgatgagtggggagattattcagatgtcaccacaaatgaatctaatttttgagccaatggatttagaagttgcttcccctgccactgtttccagatgtggcatgatttacatggagcctcacatgttaggctggagaccactgatgttgtcctgggtgaatctgttacctgcgtcagtcagtgttattcaaaaggaattcataatgggcttatttgacagaatggtccctgtttcggttgaatttattagaaagcatacaaaggaattatctcctacttccgatacaaacttggtccggtccttaatgaatctaatagactgttttatggatgattttgctgatgaagtcaaactaaaggagagaaatgatcgagaaacttactctttgcttgagggcatttttctgttttcattgatctggtccgttggtgcttcttgtacagatgatgatcgattgaaatttaataagattcttcgagaactaatggaaagtccaatttcagatcgaactcgaaatacgtttaaattacagagtggtactgagcaaacatcctcaaaggcactaactgtcccatttcctgaaaaaggaacaatttatgattatcaatttgtcactgagggaataggaaaatgggaaccatggataaagaaattgaaagaagctcctccaattcctaaagatgtaatgtttaatgaaatcattgtgccaactctggacacaattcgatactctgcattaatggaattgctgaccacccatcaaaagccttcaatatttgtaggaccaacaggaactgggaaaagtgtttacattacgaattttcttttaaatcaactaaataaggaaatctacaaacctctgctaattaacttctcagcacaaactacagcagctcaaactcagaatattgtcatgtcaaaattggacaagagaagaaagggagtttttggtcctcctttgggcaagagaatggttgtctttgtagatgatgtcaatatgcctgctcgggaggtatatggggctcaacctcccattgagttacttagacagtggttagaccactggaactggtatgatctaaaagattgttccatgattaaactagtggacattcagatcatgtgtgctatgggacctccaggtggtggtcgaaatccagtaactcctcgatacatgcgacatttcaatattataacaatcaatgagtttagtgataaatccatgtatacaatcttctctagaatcttaacttggcatttagaaatctgttataaatttccagatgaatttctagatttgaccacacaaatcgtaaatggcacaatgactctgtataaagaagcaatgaagaatctcttgcctactccagctaaatctcactacttgttcaacctccgtgatttctcccgtgtcattcaaggtgtttgtttgtcaagaccagaaacaacagaaaccacagaagtgattaaacgtctttgggttcatgaggtccttcgagtgtattatgaccgccttctggacaatacagacagaagctggctcatcaactacattcaagaaattttgagaaactacatgtatgaagattttcatgagctttttcagcgtttggattttgataatgatggcatggtggaagcagatgacttacgcagcttaatgttttgtgatttccatgatcccaagagggaggataccaactacagagaaatcgcagatgtggataatcttcgaatgatagtagaaattcacctagaagaatacaacaatataagcaaaaaacccatgaaccttgtcttgtttcgatttgccatagagcacatcagcagaatttccaggatcctgaagcagcctcgcagccatgctctcctagtaggggttggagggagtggaaggcagtctgtcaccagattagctgcccacatggctgattattcagttttccaagttgaaatctctaaggggtatgatactactgaatggcatgaagatttaaaagtgatcttaaggaaatgtgcggaaggtgagatgcagggtgtcttcctgtttacagatactcaaattaaagaagagtcttttctggaagatgtcagtaatctgctaaatgctggggagattccaaatctctttgcattagatgagaagcaagagatatgtgataagatgcgtcagttagatcgccagcgggataaaaccaagcaaacagatggcagccccatagcccttttcaacatgtttattgatcattgccgcagccaactgcatgtggtccttgccatgagtcccattggagatgcatttcggaatcgtcttagaaagttccctgctcttgttaactgctgtaccattgactggtttcagtcatggcctgaagatgcactccaggcagttgcctcacgattcttggaagaaattgaaatgtcagaggaaatacgagatggctgtatcgacatgtgtaaaagcttccacacttctactatagatttatccaaatctttctttgttgaacttcaaagatacaattatgtgactcctacctcttacctcgaattaatctccaccttcaaactgttgttagaaaagaaaagaagtgaagtaatgaaaatgaaaaagagatatgaagtgggtttggagaaactggattctgcttcatctcaagtagccacaatgcagatggagttggaggcactacatcctcaattaaaagttgctagcaaagaggttgatgaaatgatgataatgattgagaaagagtctgtagaagttgccaaaactgaaaaaatagtgaaagctgatgaaacaatagcgaatgaacaagctatggcttccaaagccatcaaagatgagtgcgatgctgacctggcaggtgccttgccaatattagagtcagcactggccgcccttgatactcttactgcacaggatattacagtggtaaaatccatgaagagtcctcctgctggtgtcaagcttgttatggaagctatatgcatcttgaaaggaatcaaagctgacaaaatccctgacccaacaggttcagggaaaaaaattgaggatttctggggcccagctaagagacttcttggtgacatgaggtttctgcagtcacttcatgaatatgacaaggacaatattcctccagcttatatgaatatcataagaaaaaattatattccaaatccagattttgtaccagaaaaaatcagaaatgcttctacagcggccgaaggtctgtgcaaatgggtcatagcaatggattcatatgataaagtggcaaaaatagtagctcccaaaaagataaaactggctgcagctgaaggggagcttaaaattgccatggatggtcttagaaagaagcaggcagcccttaaggaagttcaggacaagctggccaggcttcaagacacacttgaattaaataaacaaaagaaggctgacctggaaaaccaggttgacctttgcagcaaaaaactagaacgagctgaacagttgattggaggccttggaggtgagaaaactcgatggagccacacagctctggagctaggtcagctgtacatcaacttgactggggatatcctcatttcctccggagtggttgcttacctcggagccttcacatccacctatagacagaatcaaactaaagagtggacaactttgtgcaaaggaagagatatcccctgctcagatgattgctctcttatgggtaccctgggagaagctgtgacaattcgaacttggaatattgctggattaccttctgactcattttccattgataatgggataatcataatgaatgcaagaaggtggcctctgatgatagatcctcaaagtcaggctaataaatggatcaagaacatggaaaaagccaatagtctttatgtgattaaacttagtgaacctgactatgtcaggactctggaaaattgcatccagtttggtactcctgtgttgctagaaaatgttggcgaagaactagatcctattttggaacctcttctactaaaacaaacctttaagcagggtgggagtacatgtatccggcttggggactccacaattgaatatgcacctgacttccgcttctatattactaccaagttaagaaatcctcattatcttcctgaaacatcagtaaaggtaacattattaaacttcatgataacccctgagggaatgcaagatcagcttctgggaattgtggtggcacaagaaaggccagaccttgaagaagaaaagcaagccttgatattacaaggagctgaaaataaaaggcagttaaaagaaatagaagacaagattttagaagttctttcatcttcggaaggcaatatattagaagatgaaactgctattaagatattatcttcctccaaggccttggctaatgagatttctcagaagcaggaagtagccgaagagacagagaaaaagattgacaccacccgcatgggctatcgtcctattgccatccattcttccatcctatttttttctcttgctgatttagccaacattgagcccatgtaccagtattcactgacctggtttattaaccttttcatcctgtctattgaaaattcagagaaatcagaaattttggcaaaaaggcttcagattctcaaggatcactttacttattcactgtatgttaatgtctgccggtcactctttgaaaaggataagctgctcttttccttttgtctaaccataaatctactgctgcatgagcgggcgattaataaagctgagtggagatttctgctaactggtggcattggactggataatccttatgccaacccttgtacatggcttcctcagaaatcctgggatgaaatatgtcgattagatgatttgcctgccttcaaaaccattcgtagagagtttatgcgcttaaaggatggatggaagaaagtatatgatagtttggaaccacaccatgaggttttccctgaagaatgggaagataaagcaaatgagtttcaaaggatgcttattattcgttgcttgaggccagacaaggttattccaatgttgcaggaatttataatcaacagattgggacgtgcattcattgaaccacccccctttgatttagccaaggcatttggagacagtaactgctgtgcaccactgattttcgtgctctctcctggagcagatcccatggctgcccttctaaaatttgctgatgaccagggatatgggggatcaaaacttagctctttatctcttggtcaaggccaagggcccattgctatgaagatgttagaaaaagctgtcaaggaaggaacatgggttgttcttcagaattgtcaccttgccacctcttggatgccaacccttgagaaagtctgtgaggagttaagcccagagtcaacacatccagatttccgaatgtggctaacgagttacccatctccaaatttccctgtgtcagtactgcagaatggagtgaaaatgaccaatgaagcaccaaaaggtttacgggctaatatcattcgatcatacctcatggacccgatctctgatccggagttctttggcagctgcaaaaagcctgaggaattcaagaaattgctttatggcctgtgtttctttcatgctttggtacaagaaagacggaaatttggacccctagggtggaatattccttatgagttcaatgagacagatctgagaatcagcgtacagcagctccacatgttcctgaaccagtatgaggaactgccgtatgaggctctgcggtacatgactggcgaatgcaattacggaggcagagtgaccgatgactgggaccggcgcacgctgcgcagcattctaaacaaattcttcaatcccgaattagttgaaaattcagactataagttcgactcaagtggcatctattttgttcctccttctggtgatcacaaaagctacatcgaatacacaaagactctgccactgaccccagcaccagaaatctttgggatgaatgccaatgcagatatcactaaggatcagtcagaaactcagctgctatttgataacattcttcttacacagtctcgttcagcaggtgctggtgcaaaatcatcagatgaagtagtgaatgaggtcgctagtgacatcttgggcaaacttccaaacaacttcgacatcgaggctgccatgaggaggtacccaacaacttatactcagagcatgaacactgtacttgtccaagagatgggacggttcaataagttactgaagaccataagagattcgtgcgtaaatattcaaaaagcaatcaaggggcttgcagtcatgtctacagatcttgaagaagtggttagcagcattttgaatgtcaaaattccagaaatgtggatgggtaaatcctacccaagccttaaaccacttggcagctatgtgaatgacttccttgcaagactaaaattcttgcagcaatggtatgaggttggtcctcctccagtcttctggctttctggcttcttcttcacacaagccttcctgaccggtgcccagcagaactacgccaggaaatacacaattcctattgatcttcttgggtttgactatgaagtgatggaagacaaagaatacaagcatcctcctgaggatggtgttttcattcacggattatttctggatggagcttcctggaatagaaagatcaagaaacttgcagaatcgcatcccaaaattctttatgatacagtgcctgtgatgtggctaaagccctgtaagagggcagatataccaaaacggccaagttatgttgctccattgtataagacaagtgagcggagaggagtattatccaccactggccattccacgaattttgtgattgccatgactcttccctctgaccaacccaaggaacactggattggacgaggtgtagcactgttatgtcaacttaattcataaccagaagacatcatttccttgttcctatttcttgttggctggctgagtagagaaagcatattattttactacttaaacctttttttttgtttgtttaaatacatttgactaaagttataattatgaatttacttatgagcaaatgcagctaaacttaatatgactcatacttaaatgtaaggaaatgttctgaaataaataaagactaaagaaaacacactggc

SEQ ID NO: 26 - DNA, 2717 bp, Homo Sapiens
ttgacctctcgtccctgagaggcgggtgggtgttagttcagagggttatgggagggctctggcgtcctggatggaggtgcgttcctttctgtggctggcgctggatccaccctgggtctccaaccagggctgcagagagggtagagccgtttcttaggccagagtggagtgggacaggaggtgccgagagaggactgaggtggcttgggacatggaagcgctgcagccttcgagcccggcatccagcattgcagccgccgcggcggcctaagagctcgaaccctttcacacgcgcgcaggaggaggagcggcggcggcagaacaagacgaccctcacttacgtggccgctgtcgccgtgggcatgctgggggcgtcctacgctgccgtacccctttatcggctctattgccagactactggacttggaggatcagcagttgcaggtcatgcctcagacaagattgaaaacatggtgcctgttaaagatcgaatcattaaaattagctttaatgcagatgtgcatgcaagtctccagtggaactttagacctcagcaaacagaaatatatgtggtgccaggagagactgcactggcgttttacagagctaagaatcctactgacaaaccagtaattggaatttctacatacaatattgttccatttgaagctggacagtatttcaataaaatacagtgcttctgttttgaagaacaaaggcttaatccccaagaggaagtagatatgccagtgtttttctacattgatcctgaatttgctgaagatccaagaatgattaaagttgatcttatcactctttcttacactttttttgaagcaaaggaagggcacaagttgccagttccaggatataattgaagtcagcaactaagtcttccttcaaagttgtgatttttgggaaaatcatatatcctatcttctcaaaggagaaatattgtacaataatatgaaggcttatattttaaataattattttttctcaactaatttttttcacttaaacttgagagaacaagttcagcttttatcataagaaactcatatgcctagctagaatatatgactgactattcaataccatactgaagagtttgatactattaaaataagccgctttgttttttaaatatgcaggcatgggttcagcttaattccataattcccttccagattattaactcttcatacttacagcaatgaatctgacaatgtttttcaaaaatgtatgctcagggttatttgtttcaagtcataggccagaacttctaaccatgtttattgtgtctaaaagagttggttgctattttccttcattatgaatagtcagtattttaaaagctcaaagtagaagaggagtcactaagccctaacagcttgtccaaagatttaaattcttatttcaaatttgatttgtcctttaaggtttagggctattttatattcagagttctgaataattactttgaaactgtagtatcataaaattgaaataaaatacatctactaggctgttagccaaagcatcaccattacaagtccatgaatgttaaaatgtacaggtgggattgtgaagatttactgacatcaaaagttcttctggaaacaaacctttgttaaaaaaaaaaagtattaaattgttttaatagtgatttatttgtcatcaaatgtacaacttattctaaatattttcattttctgtgttctaaatagaaatattaagttgcagtaaaaagagaaaaaaaggctatttagcattacaaagaatcatatttaaaggctgcccaatgtagagtctagtgacctgttcaggacacctgaaatataattaaatgacaattatcaaggttttaacaatttataattctaaaccagaggattataaagaagtgcaaattgacttttacattcaactttagttaaatgaaggcactcagtattcttcctgaataatacattcagtttctcacattttatgctttcatctattcagaattatttcatagtaaaataatctactcttatcacagctgtgtgacgatttctaaatgtaggaaggcctgtgaaacatgacactgcagttaaattggttggcctaaggactaagtaatttttcttctgctgaagttttaagtgagtatttgttccaaacaagttctgttgaaatctcacgctgttgtcaggaatcagtgttatcctggaactgttattctatttaatcttcattatagcagaaatgtgccaccatggctttgacatgttggtaggtattgtcttccaggcttcaaagctgcacagagtctacgttttagagagttggcacctttgatgtggtagtgagctgatcatccactttcttctaaaataaagagaagaaaatggccagtattcatcctgtccttctctttccccattccttgataactctcttgtctttactgggaagctggagagtcacagtctagtagaagaaagattagaaaaatttcaactgtaggtgcctttgcaacctatcctgggagaccctaaaacatatttagttttagtgcctagagattttcactcctctaacatctctggatacagtgtccctggtcaacatgaagaagttacagaagaacgctttctgatcctggcccctaaagaatttacttgtgctaagtaataaaattcctattgatcaaaaaaaaaaaaaaaaaa

SEQ ID NO: 27 - DNA, 2556 bp, Homo Sapiens
ggcagccgtccggggccgccactctcctcggccggtccctggctcccggaggcggccgcgcgtggatgcggcgggagctggaagcctcaagcagccggcgccgtctctgccccggggcgccctatggcttgaagagcctggccacccagtggctccaccgccctgatggatccactgaatctgtcctggtatgatgatgatctggagaggcagaactggagccggcccttcaacgggtcagacgggaaggcggacagaccccactacaactactatgccacactgctcaccctgctcatcgctgtcatcgtcttcggcaacgtgctggtgtgcatggctgtgtcccgcgagaaggcgctgcagaccaccaccaactacctgatcgtcagcctcgcagtggccgacctcctcgtcgccacactggtcatgccctgggttgtctacctggaggtggtaggtgagtggaaattcagcaggattcactgtgacatcttcgtcactctggacgtcatgatgtgcacggcgagcatcctgaacttgtgtgccatcagcatcgacaggtacacagctgtggccatgcccatgctgtacaatacgcgctacagctccaagcgccgggtcaccgtcatgatctccatcgtctgggtcctgtccttcaccatctcctgcccactcctcttcggactcaataacgcagaccagaacgagtgcatcattgccaacccggccttcgtggtctactcctccatcgtctccttctacgtgcccttcattgtcaccctgctggtctacatcaagatctacattgtcctccgcagacgccgcaagcgagtcaacaccaaacgcagcagccgagctttcagggcccacctgagggctccactaaaggaggctgcccggcgagcccaggagctggagatggagatgctctccagcaccagcccacccgagaggacccggtacagccccatcccacccagccaccaccagctgactctccccgacccgtcccaccatggtctccacagcactcccgacagccccgccaaaccagagaagaatgggcatgccaaagaccaccccaagattgccaagatctttgagatccagaccatgcccaatggcaaaacccggacctccctcaagaccatgagccgtaggaagctctcccagcagaaggagaagaaagccactcagatgctcgccattgttctcggcgtgttcatcatctgctggctgcccttcttcatcacacacatcctgaacatacactgtgactgcaacatcccgcctgtcctgtacagcgccttcacgtggctgggctatgtcaacagcgccgtgaaccccatcatctacaccaccttcaacattgagttccgcaaggccttcctgaagatcctccactgctgactctgctgcctgcccgcacagcagcctgcttcccacctccctgcccaggccggccagcctcacccttgcgaaccgtgagcaggaaggcctgggtggatcggcctcctcttcaccccggcaggccctgcagtgttcgcttggctccatgctcctcactgcccgcacaccctcactctgccagggcagtgctagtgagctgggcatggtaccagccctggggctgggccccccagctcaggggcagctcatagagtcccccctcccacctccagtccccctatccttggcaccaaagatgcagccgccttccttgaccttcctctggggctctagggttgctggagcctgagtcagggcccagaggctgagttttctctttgtggggcttggcgtggagcaggcggtggggagagatggacagttcacaccctgcaaggcccacaggaggcaagcaagctctcttgccgaggagccaggcaacttcagtcctgggagacccatgtaaataccagactgcaggttggaccccagagattcccaagccaaaaaccttagctccctcccgcaccccgatgtggacctctactttccaggctagtccggacccacctcaccccgttacagctccccaagtggtttccacatgctctgagaagaggagccctcatcttgaagggcccaggagggtctatggggagaggaactccttggcctagcccaccctgctgccttctgacggccctgcaatgtatcccttctcacagcacatgctggccagcctggggcctggcagggaggtcaggccctggaactctatctgggcctgggctaggggacatcagaggttctttgagggactgcctctgccacactctgacgcaaaaccactttccttttctattccttctggcctttcctctctcctgtttcccttcccttccactgcctctgccttagaggagcccacggctaagaggctgctgaaaaccatctggcctggcctggccctgccctgaggaaggaggggaagctgcagcttgggagagcccctggggcctagactctgtaacatcactatccatgcaccaaactaataaaactttgacgagtcaccttccaggacccctgggtaaaaaaaaaaaaaaa

SEQ ID NO: 28 - DNA, 425 bp, Homo Sapiens
ccagagaggggaggtgaccccaggccccaggaaagggagcgaggacagcgctggttcccggctccccgcaccatcatggctttgcctctgaggcccctgacccggggcttggccagcgctgccaaaggaggccacggaggagcaggagctcgtacctggcgtctgctgaccttcgtgctggcgctgcccagcgtggccctctgcaccttcaactcctatctccactcgggccaccgcccgcgccccgagttccgtccctaccaacacctccgcatccgcaccaagccctacccctggggggacggcaaccacactctgttccacaatagccacgtgaaccctctgcccacgggctacgaacacccctgaggccccggacgcccccggacacaataaaggtgtgaagcttaaaaaaaaaaaaaaaa

SEQ ID NO: 29 - DNA, 11740 bp, Homo Sapiens
cccggagccggtgcgaggagggcacccggtgcgtccccggagcggggaggccaggccgggcaaccctggggccggtcggggcggcgtcactgcaccctccgccaggctccgcgggatgcaccgtggtagccgagggcggaggcgacactctcaggtaaattggcaggatgaggagcagcaaatcaaaagaggtgcctttaccaaatccaaggaactctcaaagcaaggatactgttcaagcagatataaccacatcgtgggatgcactttctcaaaccaaggctgctctgagacacattgaaaataaattagaagtagcccctacaagtacagctgtgtgtgattctgtcatggataccaagaagtcttctacaagtgctactcgaaaaataagtagaaaagatggtagatacctggatgattcttgggttaatgctccaatctccaaatccactaaatcacgaaaagagaaatctcgtagtcctctcagggccaccaccctggagggtaatgtgaagaaaaataatcgtgtggaatttcgtgaacctttggtttcttatagggaaatccatggtgcaccttccaatttcagttccagccatctggaatcaaagcacgtatactgtgtagatgttaatgaagaaaagactgagagcggtaactggatgataggcagtcgagaagaacggaatatacggagctgtgattttgagagctcccaatcatctgtcatcaatgatacagttgttaggtttttaaatgatcgaccagcaattgatgcattgcaaaattctgaatgtttgattaggatgggagcttctatgagaactgaggaagaaatgcctaacagaacaaaaggaagtgagaataatttgaagctttctgtgaataacatggcccatgatactgatccaaaagcgttacgactaactgactcttctccatcctctactagtacttctaattcccaaagattagatattctaaagcggcgacaacatgatgtcaaactggaaaaacttaaggaacggattagaaaacagtgggaacactcagaagaaacaaatggccggggccagaagctgggtcatattgaccatccagtaatggttgttaatgttgataactcagtaacagcaaaagtcagaaaagtggcaacagcaccacctgctccagcatataaaggtttcaacccttcagagaccaagattcgaacacctgatgggaaagtgtggcaggaggctgagtttcaaaacatgagtagagaactgtatcgagatttagcacttcactttgcagatgatatttctataaaggagaaacctgctgaaaaaagtaaagagaagaaagtagtcaagccagtacgaaaagtccaaaaagtagcacagttatcaagtacagaatgcagaacaggtagtagtcatcttataagtacatcttcttggcgagatggacaaaaattagtaaagaagattctgggacctgctcccagaatggagccaaaagagcaaagaacagcatcaagtgacagaggtggaagaagaagaactgctaaatctgggggtcacattggaagagcagaatctgatcccaggttggacgttttacatagacatcttcaaagaaactcagaacgttcgagaagtaaatctcggtctgaaaataatataaagaaactagcttcatctcttccagataataagcaggaggaaaatactgccttaaataaggactttttacctattgaaattcgtggcattcttgatgacctacagctggattctacagctcacactgcaaagcaagatactgtagagttacagaaccagaagtcatcagcaccagtacatgctcctaggagtcacagcccagtaaaaagaaaacctgacaaaataacagctaatgaagatccccctgttatttccaaaaggcgccactatgacacagatgaggtacgacagtacattgttaggcagcaggaggaaaggaagagaaagcaaaatgaagagaagaaggctcaaaaggaggctacagaacagaaaaacaaacgattacaagagctctaccggaagcagaaggaagcctttactaaagtaaaaaatgtccctccttctgagccatcagcaactaggcgactacaggaaacttactccaaattgctactagaaaagaccttgcttgaagagccatctcatcaacatgttacgcaggaaacacaggccaaaccagggtatcagccatctggagaatctgacaaagaaaacaaagtacaggaacgtcccccaagtgcatcttccagtagtgacatgtctctctcagaacctccacagcctcttgcaagaaaagacttgatggaatctacatggatgcagcctgaaagattgagcccacaagttcaccattctcaaccacagccttttgctggaacagctggaagtttactctcccatctcttgagtttagagcatgtaggaattttgcataaggattttgaatctattttaccaaccaggaagaatcataatatggcttcaaggccattaacttttacacctcaaccatatgtgacctcaccagctgcttatacagatgccttgttaaaacctagtgccagccaatataagagtaaactggatcgtattgaagccttgaaagcaacagctgcttctttgtccagcagaattgaaagtgaagccaagaaattagctggggccagcattaactatgggtcagcatggaacactgagtatgatgtgcagcaggcacctcaagaagatggaccttggaccaaggctgtaactccacctgtgaaagatgataatgaagatgttttctctgccagaattcagaagatgctgggaagctgtgtatctcatgcaacttttgatgatgatcttcctggtgtaggcaatcttagtgaatttaaaaagcttcctgagatgataagaccacagagtgccatatcaagctttagagtgagatcccctggtcccaaaccacaagggctactggcacagttatgtaaaaggcagactgactcttctagctctgatatgcaagcctgttctcaagacaaagccaaaatatctcttggttccagcatagattcagtcagtgaagggcctcttcttagtgaggggagtctctctgaagaagagggagaccaggatggacagccccttttgaaagtagcagaaattttaaaagaaaaggaattttgtcctggagaaagaaatagttatgaacccatcaaagagtttcagaaagaagctgaaaaattcttgccactttttgggcacataggtggtacacaaagcaaaggaccatgggaagaattggcaaagggaagtccacatagcgtcattaatatttttacaaaatcctatcagttatatggaaaagggtttgaagacaagttggacagaggaacatcaacatcacggcctttgaatgccaccgcaactcctctaagtggtgtttcatatgaagatgattttgtctcctctccagggactgggacttcgacagaaaaaaaatcaactcttgaacctcatagcactttaagccctcaggaggaccattctaacagaaagtctgcctatgatccttcctctgtggatgttacctcccagcattcatcaggagcccagtctgctgcatcgtctcgttcatctacttcttctaaaggaaagaaaggaaaaaaggaaaagacagaatggttggattcattcactggaaatgttcagaactcacttcttgatgaggaaaaagcagaacgtggctcccatcaaggaaagaaatctgggaccagcagcaaactttctgttaaagattttgagcagactcttgatacagatagcactttggaggatctttctggacattctgtgagtgtctcatcagataagggaagatctcagaaaactccaacttctcccctgtcaccaagttcccagaaatcattgcagtttgacgttgcaggaacttcttcagaaagatctaagtcgtcagtaatgcctccaactataacaggatttaagcctaatgcacctctcactgatctgaacccggcagccagcagaacaacgacagagaacatggctccaataccaggttctaagcgcttttctcctgctggcctccatcatcgtatggcagcagaactcagttatctgaacgccattgaggagtcggtgcgccaactgtcagatgtagaaagagttagaggcatttcacttgctcagcaggagagtgtgtctctagctcagataataaaggcacaacagcaacgccatgaaagagacttggccctcttgaaactaaaggctgaacaagaggctctggagagtcagagacaattagaagaaacccgaaacaaagcagctcaggtccatgcagaatcattacagcaggtggttcaatcacaacgggaagtaactgaagtcctgcaggaagcaacgtgtaaaatagcagctcagcagtcagaaactgctcgcctcaccacagacgcagcacgtcaaatctgtgagatggcagagttgactagaactcatatctcagatgctgtcgtggcttcaggagctccccttgcaatactgtatgaccaccaacggcagcaccttccagactttgtgaaacagctgaggaccagaactgaaacagataggaaaagtccatctgtttcactctctcagagtaaagaagggacccttgactcaaagcatcagaagtattctgcttcatatgatagttattctgagtcttcaggatacaagaatcatgatagaagaagtagcagtggtagcagccgccaagaaagtccttcagttccatcttgtaaggaaaatgagaagaaacttaatggtgaaaagatagagagttccattgatgaacaggttcagactgctgcagatgattctctacgaagtgatagtgttccatctcttcctgatgaaaaagactcaacgtctattgcaacagaatattctctgaaatttgatgaatccatgacagaagatgaaatagaagaacaatcatttcgatcattactaccttcagagagtcaccgcagatttaacatggaaaagagaagaggtcatcatgatgactctgatgaagaagcttctccagaaaaaactacactgtctactgccaaggaactgaacatgccattctcaggaggacaagatagcttttctaaatttactatggagatggttcgacagtatatgaaagaggaagaaatgagggcagctcaccagtcttcactcctgcgtctccgtgaaaaggccttgaaggagaagactaaggctgaattggcctggttagagcatcaaaaaaaacatctacgagacaaaggagaggatgataaaatgcccccgctccggaagaaacagcgtggtttgcttttaaggttgcagcaagaaaaggcagaaataaaacgtcttcaagaagccaataaggcagctcggaaggaaagacagctgattcttaaacagcaggaggagatagaaaagatccgacagaccaccataaaactacaggagaaattgaagtctgcaggggagagtaaattggactctcatagtgatgatgatacaaaggataataaggcaaccagtcctggtccaactgacttggagacccgcagtccttctcccatttcaatctccagcagtgaaactagcagcattatgcagaaactgaagaaaatgagaagccgcatggatgaaaagtttctgacaaagcgggagcaaaaattaatgcaacggcgacaacatgcagaggagctcctagagtggaagcgacgtttagatgcagaagaagcagaaattcgtcaaatggaaaaacaagctttggctgcctgggacaaagaattaataaaacccaaaactcctaagaaagaactggaggaccagagaacagaacagaaagaaatagcaagtgaagaggaatctccagtacctctgtactctcatctaaacagtgaaagctccattccagaagaattaggcagccctgctgttgaatatgtaccatccgagtctataggacaggagcagccagggagtccagatcacagtatacttactgaagaaatgatttgttcacaggaactagaatcttctacctctcctagtaaacattcacttcccaaaagctgcacatctgtgtcaaagcaggagtctagcaaaggaagtcataggactggaggacaatgtcacctgcctatcaagtcccatcagcactgttatagttggtcagatgagtcattatctatgacacagtcagaaactacatctgaccagagtgatattgaaggtaggatcagagctctgaaggatgagttgcggaaaagaaaatcagttgtgaaccagctgaagaaggaacagaaaaaaaggcaaaaggaaagactgaaagcccaagaagccagtctgatcaagcagttagagtcatatgatgaatttattaagaaaactgaagccgagcttagccaagatttggaaacatcaccaacagccaagcctcagattaaaacgctctcctcagcttctgaaaaacccaagatcaaacccctcacaccactacacagatctgaaacggcaaagaattggaaatcactaacagagtcagaacgttccagaggatccctggagcctattgctgaacatgttgatgcttcactgtctggttctgagagatcagtatcagaaaggtctttatctgcatatgcaaagagagtaaatgaatgggacagtcgaacagaagattttcagaccccatctccagttctcagatcatcaaggaaaatcagagaagaatctggagattctctagaaaatgtacctgcattacatcttctcaaagaattaaatgccactagtagaattcttgatatgtcagatggcaaggttggagaatctagtaaaaaatcagaaataaaagaaatagagtatacaaaattgaagaagagtaagattgaagatgccttttctaaagaaggtaaatctgatgtcttactgaaattagtcctagaacagggagattcatctgaaattctttcaaagaaagatcttcctttagattctgaaaatgttcagaaagacctagttggattagctattgaaaatctccataaaagtgaggaaatgttgaaagagagacagtcagatcaagatatgaatcatagtccaaacatccaatcaggaaaagacattcacgaacaaaagaacacaaaggaaaaagatttgtcttggtcagaacatctttttgctcctaaagagataccatactctgaagattttgaagtgtcttctttcaagaaagaaatttcagctgaattgtacaaagatgattttgaggtgtcatctttgctgtcactcaggaaagactctcagtcttgcagagataagccacagccaatgaggagctctacaagtggagccactagctttggtagtaatgaggaaatcagtgagtgcctaagtgagaaaagcctttctatccatagcaatgttcattctgacaggctgttggaactcaagtcccctactgagctgatgaaaagtaaggagcgcagtgatgtggagcatgaacagcaagttactgaatccccttccttggcttcagttcctactgcagacgagttatttgatttccacattggtgatagggtgttgattggaaatgttcagccaggaattcttcgattcaaaggtgagactagttttgctaaaggattttgggccggagtggagttagataaacctgaaggaaataacaatggaacatatgatggtattgcatattttgagtgcaaagaaaagcatggtatttttgctcctcctcaaaaaatatctcacattccagaaaactttgatgactatgtagacattaatgaagatgaagactgttactcagatgaacgatatcagtgctataatcaagagcaaaatgatacagagggtccaaaagacagagaaaaggatgtcagtgaatatttttatgagaaatccctacctagtgtgaatgatatagaagcctcagttaatagaagtagaagccttaaaatagaaacagacaatgtacaggacatttctggggtacttgaagcccatgttcaccagcagtcttcagtggattcacagatttcttcaaaggaaaacaaagacctcatttctgatgccacagaaaaggtttccatcgctgcagaagatgacactttagacaataccttttccgaagaattggagaagcaacagcagtttacagaagaggaagacaacctatatgctgaagcttcagaaaagctttgtacaccacttctggatcttttaacaagagaaaaaaaccaactggaagcccagctgaagtcatcactaaatgaggaaaaaaagtcaaaacaacaactggaaaaaatcagcttactgacagacagtttactaaaagtctttgtaaaggacacagtcaatcaactacaacaaatcaaaaaaaccagggatgagaaaatccagcttagcaatcaggagcttcttggtgatgaccaaaagaaagtaacaccccaagacctatcccaaaatgttgaggaacagtcgccaagtatttcaggttgcttcttaagttctgaattggaagatgaaaaagaagagatttcctctccagatatgtgtcccagaccggagagcccagtatttggtgccagtgggcaggaagaacttgctaagagacttgctgaacttgaactcagccgggagttcctgagcgcgttaggagatgatcaagactggtttgatgaagactttggtttgagctcttctcacaagatccaaaaaaataaggcagaagaaaccattgtacctctaatggcagaacctaaaagagtaacccaacaaccatgtgaaacattattggcagtcccccatactgcagaagaagtagagattcttgtacataatgcagcagaagaactttggaaatggaaagaattaggccacgatcttcatagcatcagtattcctacaaaactgcttggctgtgccagtaaaggtctagatatagaaagcactagtaaaagggtctacaaacaggcggtttttgatttaacaaaagagatttttgaggaaatatttgctgaggatcccaacttaaatcaacctgtctggatgaagccatgtagaatcaactctagttatttccgacgagtgaaaaatccaaataaccttgatgaaatcaagagcttcatagcaagtgaagtactcaagttgttcagtcttaaaaaggagccaaaccacaaaacagattggcagaaaatgatgaaatttggaagaaagaaaagagaccgagtggatcatatcctggttcaggagctccatgaggaggaggcacagtgggtgaactatgatgaggatgagttgtgtgtgaaaatgcagctagccgacgggatctttgagaccctgatcaaagatactattgatgttctgaatcagatcagtgaaaagcaggggagaatgctactagtgtgacatcttgcaaataaatcgaacgctgagtgctaatgtgagtcctgggcctttctgcctcctgatgtacacccatcgccatcatagcaagagtgcttctggaccttgtacttattcttaaagactaccagtatggagttcataggacaatgtggtacacctggtattacagcctttgcctttcgagactatccactggattaatgggttattttcagtgggcagggttgcacagtgtaatcctacaccttttgctaacacccctactaggtcccagagggccagaaacacctgacttacctctgagtttagactagggtatcacttctttgagtctgaagtcaagtgagagaggtatagataaatgcatcacatcacttttgaaatgtaattctggtctataccatggaagtcataaatggacattatagtctctaaacagtattaaacccttaaccacttctaaaataggcaagctcaataatgtctgccaacttcacattctggagtttatttcatttctttttgaagaccattttcttccattattgtagttgagcagcaccaagtggactgtcaggctaacaggaataagtggtagccttgctttctgagcaccatctaaagaattttaaacctctgcattatgtttagtgttctctgtgtgggcatgaaaacaaagaaatgcccctactgaagactgggctcaaaggaccaatgcagggctggttcttttaccccttggtttactcctgcacttgtcttactcattctgaatctctaccagctgctcccagaatcacagatactcaggaccatctcaggcatccaggcatggcaaagtggaaataattcattttggcctgcaaaccttcaactcccatctttccccaagaagtcagagatgctgttacttgaatgatttaggaaatgagtgtgtgcaccaaagacaaaaagatattgtctattgtttgtgtgcttgttttgcgctatggaacattttttaatttattttaagataaattattaagttgaaaatgtgtgtccctattcagaagtgaaagattcatcttgtaatagttaaacctccatcttgaagcttctatggttcatagtctttgcacaggaacctgtggttttaacaaaccaatacacatattgaagaagtcattttaattcagtgaaacgaagatgggcttttccagatcacctgcaatagcagcagtgggataaaatgatttaaaaacactgtacaatttaactctgcctctcttgcagcattgcttctcacaactattacctgcatctgaaaaaaaatctatagactccagctgctacattagagcataagagatgctctcctgggacctcagtaccctgccttcttgactggtttccgttcatcagtcctgtccctcttcaagtaatctagaagaatgtggatactcttaggcgtgaatgtaaatgccttaatattgaaggtcctggttagaagcatgatacaagacatctactggattcatatttacaaatatcctggaatgttatagcttcaaagtatattagaaaaaccccaaagatggtataatctttaagtgtgcacgttcgtttatttctgcatcttccctccaaacttgcctttgcatcttaaatatttcactatgcacactcccattcctcttgggtttcatcttgtcgtttaagaaatgtactgaaataatcattggaatatttgcattttgcacaatgactggtatgatagctcttgacaaataaggaaagcactgaaatgttgtgattgggtctcgggaaatgctcagattgatgtcttaccagcatttcttctgggcttgtgatgttgagctgtagtcttgtagccataatgagcaaattgactaagagaagcaaaggtttcttggggttattaaccagtagtgtggaaatactagttttatgtggccaaggaaaagcaaagccttttcttttcagtttgtgttatttggaagacagaaaaacatcttgtctacatcctttggctgtttgtaggatcacgttgtccttacgatactgaaactttacagctgctgtaaattttttataaatgaatttcaaaatgttataatgggactgtaggttgtttttctacatcttcattatttggacctaaaaccagtttttaataagaaagtttatctttactctttctgaaattatgactccag

SEQ ID NO: 30 - DNA, 1876 bp, Homo Sapiens
gagccatgctcgcggcgatgggctctctggcggctgccctctgggcagtggtccatcctcggactctcctactgggcactgtcgcctttctgctcgctgctgactttctcaaaagacggcgcccaaagaactacccgccggggccctggcgcctgcccttccttggcaacttcttccttgtggacttcgagcagtcgcacctggaggttcagctgtttgtgaagaaatatgggaacctttttagcttggagcttggtgacatatctgcagttcttattactggcttgcccttaatcaaagaagcccttatccacatggaccaaaactttgggaaccgccccgtgacccctatgcgagaacatatctttaagaaaaatggattgattatgtcaagtggccaggcatggaaggagcaaagaaggttcactctgacagcactaaggaactttggtttaggaaagaagagcttagaggaacgcattcaggaggaggcccaacacctcactgaagcaataaaagaggagaacggacagccttttgaccctcatttcaagatcaacaatgcagtttccaatatcatttgctccatcaccttcggagaacgctttgagtaccaggatagttggtttcagcagctgctgaagttactagatgaagtcacatacttggaggcttcaaagacatgccagctctacaatgtctttccatggataatgaaattcctgcctggaccccaccaaactctcttcagcaactggaaaaaactgaaattgtttgtttctcatatgattgacaaacacagaaaggattggaatcctgcagaaacaagagactttattgatgcttaccttaaagaaatgtcaaagcacacaggcaatcctacttcaagtttccatgaagaaaacctcatctgcagcaccctggacctcttctttgccggaaccgagacaacttccacaactctgcgatgggctctgctttatatggccctctacccagaaatccaagaaaaagtacaagctgagattgacagagtgattggccaggggcagcagccgagcacagccgcccgggagtccatgccctacaccaatgctgtcatccatgaggtgcagagaatgggcaacatcatccccctgaacgttcccagggaagtgacagttgataccactttggctgggtaccacctgcccaagggtaccatgatcctgaccaatttgacggcgctgcacagggaccccacagagtgggccacccctgacacattcaatccggaccattttctggagaatggacagtttaagaaaagggaagcctttatgcctttctcaataggaaagcgggcatgcctcggagaacagttggccaggactgagctgtttattttcttcacttcccttatgcaaaaatttaccttcaggcccccaaacaatgagaagctgagcctgaagtttagaatgggtatcaccatttccccagtcagtcaccgcctctgcgctgttcctcaggtgtaatattgttaagaaagaaaggggcaaggaaagtaagaagacatggcacgtgttctgaaaccactggtgtctgctcagatgtgttgggacaaaatgaaagtgactttcaagaaagatcagaggaatttgactcagagaaaactagatccaaatcccagctctactgtctcgtccgaattagccttgggaaaatcatttatatgctaaataatttacctttttatctaggagatgaaaagaggataatgtttccttccataaagaaagttcttgtaagaatcaaaagaaatggtgagctttaagtggtttgtaaaccataaaacacatcataaaagttctatctataaaaaaaaaaaaaaaaaaaa

SEQ ID NO: 31 - DNA, 3600 bp, Homo Sapiens
cacgaggggcttccgggcccggacgccatttccagcggttgctggttctgacgggttgtagtctgccaggacaatgagttatgactaccatcagaactggggccgtgatgggggtccccgcagctccggtgggggctatggaggggggccagcagggggtcatggaggtaaccgaggctccggaggaggcggcggcggcggagggggtggtcgaggcggcaggggccggcatcccgggcacctgaaaggccgcgaaatcggcatgtggtacgcgaaaaaacaggggcagaagaacaaggaagcggagaggcaagagagagctgtagtacacatggatgaacgacgagaagaacaaattgtacagttactgaattctgttcaagcgaagaatgataaagagtcagaagcacagatatcctggtttgctcctgaggatcatggatacggtactgaagtttctactaagaacacaccatgctcagagaacaaacttgacatccaggaaaagaagttgataaatcaagaaaaaaaaatgtttagaatcaggaacagatcatatattgaccgagattctgagtatctcttgcaagaaaatgaaccagatggaactttagaccaaaaattattggaagatttacaaaagaaaaaaaatgaccttcggtatattgaaatgcagcatttcagagaaaagctgccttcgtatggaatgcaaaaggaattggtaaatttaattgataaccatcaggtaacagtaataagtggtgaaactggttgtggcaaaaccactcaagttactcagttcattttggataactacattgaaagaggaaaaggatctgcttgcagaatagtttgtactcagccaagaagaattagtgccatttcagttgcggaaagagtagctgcagaaagggcagaatcttgtggcagtggtaatagtactggatatcaaattcgtctccagagtcggttgccaaggaaacagggttctatcttatactgtacaacaggaatcatccttcagtggctccagtcagacccgtatttgtccagtgttagtcatatcgtacttgatgaaatccatgaaagaaatctgcagtcagatgttttaatgactgttgttaaagaccttctcaattttcgatctgacttgaaagtaatattgatgagtgcaacattgaatgcagaaaagttttcagaatattttggtaactgtccaatgatacatatacctggttttacctttccggttgtggaatatcttttggaagatgtaattgaaaaaataaggtatgttccagaacaaaaagaacacagatgccagtttaagaggggtttcatgcaagggcatgtaaatagacaagaaaaagaagaaaaagaagcaatatataaagaacgttggccagattatgtaagggaactgcgaagaaggtattctgcaagtactgtagatgttatagaaatgatggaggatgataaagttgatctgaatttgattgttgccctcatccgatacattgttttggaagaagaggatggtgcgatactggtctttctgccaggctgggacaatatcagcactttacatgatctcttgatgtcacaagtaatgtttaaatcagataaatttttaattatacctttacattcactgatgcctacagttaaccagacacaggtgtttaaaagaacccctcctggtgttcggaaaatagtaattgctaccaacattgcggagactagcattaccatagatgatgtcgtttatgtgatagatggaggaaaaataaaagagacgcattttgatactcagaacaatatcagtacaatgtccgctgagtgggttagtaaagctaatgccaaacagagaaaaggtcgagctggaagagttcaacctggtcattgctatcatctgtataatggtcttagagcaagtcttctagatgactatcaactgccagaaattttgagaactcctttggaagaactttgtttacaaataaagattttaaggctaggtggaattgcttattttctgagtagattaatggacccaccatcaaatgaggcagtgttactctccataagacacctgatggagctgaacgctttggataaacaagaagaattgacacctcttggagtccacttggcacgattacccgttgagccacatattggaaaaatgattctttttggagcactgttctgctgcttagacccagtactcactattgctgctagtctcagtttcaaagatccatttgtcattccactgggaaaagaaaagattgcagatgcaagaagaaaggaattggcaaaggatactagaagtgatcacttaacagttgtgaatgcgtttgagggctgggaagaggctaggcgacgtggtttcagatacgaaaaggactattgctgggaatattttctgtcttcaaacacactgcagatgctgcataacatgaaaggacagtttgctgagcatcttcttggagctggatttgtaagcagtagaaatcctaaagatccagaatctaatataaattcagataatgagaagataattaaagctgtcatctgtgctggtttatatcccaaagttgctaaaattcgactaaatttgggtaaaaaaagaaaaatggtaaaagtttacacaaaaaccgatggcctggttgctgttcatcctaaatctgttaatgtggagcaaacagactttcactacaactggcttatctatcacctaaagatgagaacaagcagtatatacttgtatgactgcacagaggtttccccatactgtctcttgttttttggaggtgacatttccatccagaaggataacgatcaggaaactattgctgtagatgagtggattgtatttcagtctccagcaagaattgcccatcttgttaaggaattaagaaaggaactagatattcttctgcaagagaagattgaaagtcctcatcctgtagactggaatgacactaaatccagagactgtgcagtactgtcagctattatagacttgatcaaaacacaggaaaaggcaactcccaggaactttccgccacgattccaggatggatattacagctgacagcttttcaggggtggtctgaaaagccagtttgacagccattcttcatcattgtttaaattttggctggatgccaaaccctgggacatgaacaattttcatgtgtaaggtagaagccttcagtaggtagtaaagacttaatgtgcatgacttgatgttatatgtagagatatatatatatatatatataccataaaagcaatatgttctctgatcatatactctgctgtggtcatgcccactctttgggagtatattccctttatatatattgagtattgtaccacttgagaaattcctttgttctgttatacaaaattaatctttctgctcataatgattgatgataccaccagtaaaaataggatgtttaccccaaaacaagtgtcaattaagaatttgaacacaaccacattttttaaaatgaaacttctatcggaagtaaattaatttgttgtaataaagtccagtatttaataaaatgtacaatgttaaatctc

SEQ ID NO: 32 - DNA, 813 bp, Homo Sapiens
ggcttgccactgttcccacacggctaagtgtccgggttcgtcctaatcaagctgaacactagtcactgggttccacggttctcttccatgacccacggcttctaatagagctataacactcactgcatggcccaagattccattccttggaatccgtgaggccaagaaccccaggtcagagaacacgaggcttgccaccatcttggaagcagcccgccgccattttggaagtggcccaccaccatcttgggagctctgggagcaaggaccacctggtaacaataggccaaatactgtgctgataagcttgaaagcctgccctgaatcctcatctattgatggagatggtgtcatcttgccttgattgtatccagaagcttcatccccaagataaaggatggacatctctccgatgaccagcttcttttgctcgactctagagaaggttgctttctgcattctggcaactgccctctgtctacatgattagactcgttggttgcagtgctttctggagtaatgaagggatccagtgcacagggtttaacttactgggcacaatctctaagccaactctgcctgaatgggtcccctgttttttctcttctgctcttgttgaaccatatctctgttccttgtgctcctgggaatttcttgctctggtcatgaaaaaaatggaaactctctcaaggaataacaatcagagctgtctggttgacaagggacattatggttgcaagaagaccctgaagcaaggattctacatcaaagattcaggggcaatctgagtttgcatttaagatccttctgcct

SEQ ID NO: 33 - DNA, 2053 bp, Homo Sapiens
catctttgatgagggcagagctcacgttgcattgaagacgaaacctcggggaggtcaggcgctgtctttccttccctccctgctcggcggctccaccacagttgcaacctgcagaggcccggagaacacaaccctcccgagaagcccaggtccagagccaaacccgtcactgaccccccagcccaggcgcccagccactccccaccgctaccatggccgaagacgcagacatgcgcaatgagctggaggagatgcagcgaagggctgaccagttggctgatgagtcgctggaaagcacccgtcgtatgctgcaactggttgaagagagtaaagatgctggtatcaggactttggttatgttggatgaacaaggagaacaactggaacgcattgaggaagggatggaccaaatcaataaggacatgaaagaagcagaaaagaatttgacggacctaggaaaattctgcgggctttgtgtgtgtccctgtaacaagcttaaatcaagtgatgcttacaaaaaagcctggggcaataatcaggacggagtggtggccagccagcctgctcgtgtagtggacgaacgggagcagatggccatcagtggcggcttcatccgcagggtaacaaatgatgcccgagaaaatgaaatggatgaaaacctagagcaggtgagcggcatcatcgggaacctccgtcacatggccctggatatgggcaatgagatcgatacacagaatcgccagatcgacaggatcatggagaaggctgattccaacaaaaccagaattgatgaggccaaccaacgtgcaacaaagatgctgggaagtggttaagtgtgcccacccgtgttctcctccaaatgctgtcgggcaagatagctccttcatgcttttctcatggtattatctagtaggtctgcacacataacacacatcagtccacccccattgtgaatgttgtcctgtgtcatctgtcagcttcccaacaatactttgtgtcttttgttctctcttggtctctttctttccaaaggttgtacatagtggtcatttggtggctctaactccttgatgtcttgagtttcatttttcattttctctcctcggtggcatttgctgaataacaacaatttaggaatgctcaatgtgctgttgattctttcaatccacagtattgttcttgtaaaactgtgacattccacagagttactgccacggtcctttgagtgtcaggctctgaatctctcaaaatgtgccgtctttggttcctcatggctgttatctgtctttatgatttcatgattagacaatgtggaattacataacaggcattgcactaaaagtgatgtgatttatgcatttatgcatgagaactaaatagatttttagattcctacttaaacaaaaactttccatgacagtagcatactgatgagacaacacacacacacacaaaacaacagcaacaacaacagaacaacaacaaagcatgctcagtattgagacactgtcaagattaagttataccagcaaaagtgcagtagtgtcacttttttcctgtcaatatatagagacttctaaatcataatcatccttttttaaaaaaaagaattttaaaaaagatggatttgacacactcaccatttaatcatttccagcaaaatatatgtttggctgaaattatgtcaaatggatgtaatatagggtttgtttgctgcttttgatggctacgttttggagagagcaatcttgctgtgaaacagtgtggatgtaaattttataaggctgactcttactaaccaccatttcccctgtggtttgttatcagtacaattctttgttgcttaatctagagctatgcacaccaaattgctgagatgtttagtagctgataaagaaaccttttaaaaaaataatataaatgaatgaaatataaactgtgagataaatatcattatagcatgtaatattaaattcctcctgtctcctctgtcagtttgtgaagtgattgacattttgtagctagtttaaaattattaaaaattatagactcc

SEQ ID NO: 34 - DNA, 6790 bp, Homo Sapiens
cttctctcccagggcggtgcgacccggagctccagcgcccgagtctccacttcgtttgctgaaacttgctttctaccagctaagaaccatgctgcgagtgattgtggaatctgccagcaatatccctaaaacgaaatttggcaagccggatcctattgtttctgtcatttttaaggatgagaaaaagaaaacaaagaaagttgataatgaattgaaccctgtctggaatgagattttggagtttgacttgaggggtataccactggacttttcatcttcccttgggattattgtgaaagattttgagacaattggacaaaataaattaattggcacggcgactgtagccctgaaggacctgactggtgaccagagcagatccctgccgtacaagctgatctccctgctaaatgaaaaagggcaagatactggggccaccattgacttggtgatcggctatgatccgccttctgctccacatccaaatgacctgagcgggcccagcgtgccaggcatgggaggagatggggaagaagatgaaggtgatgaagacaggttggacaatgcagtcaggggccctgggcccaaggggccagttgggacggtgtcggaagctcagcttgctcggaggctcaccaaagtaaagaacagccggcggatgctgtcaaataagccacaggacttccagatccgcgtccgagtgattgagggccgacagttaagtggtaacaacataaggcctgtggtcaaagttcacgtctgtggccagacacaccgaacaagaatcaagagaggaaacaaccctttttttgatgagttgtttttctacaatgtcaacatgaccccttctgaattgatggatgagatcatcagcatccgggtttataattctcactctctgcgggcagattgtctgatgggggaatttaagattgatgttggatttgtttatgatgaacctggccatgctgtcatgagaaagtggcttcttctcaatgacccggaagataccagttcaggttctaaaggttatatgaaagtcagcatgtttgtcctgggaaccggagatgagcctcctcctgagagacgagatcgtgataatgacagtgatgatgtggagagtaatttgttactccctgctggcattgccctccggtgggtgaccttcttgctgaaaatctaccgagctgaggacatcccccagatggatgatgccttctcacagacagtaaaggaaatatttggaggcaatgcagataagaaaaatctcgtggatccttttgtagaagtttcctttgctggaaaaaaggtttgtacaaacataattgagaaaaatgcaaacccagagtggaatcaggtcgtcaatcttcagatcaagtttccttcagtgtgtgaaaaaataaaactaacaatatatgactgggaccgtcttactaaaaatgatgtagttggaacaacatatctacacctctctaaaattgctgcctctggtggggaagtggaagtaaacacaggagaaacagaggtaggctttgttccaacgtttggaccttgttacctgaatctttatggaagccccagggagtacacgggattcccagacccctatgatgagctgaatactggaaagggggaaggagttgcctacagaggcaggatcttggttgaattagccacttttcttgagaagacaccaccagataaaaagcttgagcccatttcaaatgatgacctgctggttgttgagaaataccagcgaaggcggaagtacagcctgtctgccgtgtttcattcagccaccatgttgcaagatgttggtgaggccattcagtttgaagtcagcattgggaactatggcaacaagtttgacaccacctgtaagcctttggcatcaacaactcagtacagccgtgctgtatttgatggcaactactattattacttgccttgggcccacaccaagccagttgttaccctgacttcatactgggaggatattagtcatcgcctggatgcggtgaacactctcctagctatggcagaacggctgcaaacaaatatagaagctctaaaatcagggatacaaggtaaaattcctgcaaaccagctggctgaattgtggctgaagctgatagatgaagttatagaagacacgagatacacgttgcctctcacagaaggaaaagccaacgtcacagttctcgatactcagatccgaaagctgcggtccaggtctctctcccaaatacatgaggcggctgtgaggatgaggtcggaagccacagatgtgaagtccacactggcagaaattgaggactggcttgataaattaatgcagctgactgaagagccacagaacagcatgcctgacatcatcatctggatgatccggggagagaagagactggcctatgcacgaattcccgcacatcaggtcttgtactccaccagtggtgagaatgcatctggaaaatactgtgggaaaacccaaaccatctttctgaagtatccacaggagaaaaacaacgggccaaaggtgcctgtggagttgcgagtgaacatctggctaggcttaagtgctgtggagaagaagtttaacagcttcgcagaaggaactttcaccgtctttgctgaaatgtatgaaaatcaagctctcatgtttggaaaatggggtacttctggattagtaggacgtcataagttttctgatgtcacaggaaaaataaaactcaagagggaattttttctgcctccaaaaggctgggaatgggaaggagagtggatagttgatcctgaaagaagcttgctgactgaggcagatgcaggtcacacggagttcactgatgaagtctatcagaacgagagccgctaccccgggggcgactggaagccggccgaggacacctacacggatgcgaacggcgataaagcagcatcacccagcgagttgacttgtcctccaggttgggaatgggaagatgatgcatggtcttatgacataaatcgagcggtggatgagaaaggctgggaatatggaatcaccattcctcctgatcataagcccaaatcctgggttgcagcagagaaaatgtaccacactcatagacggcgaaggctggtccgaaaacgcaagaaagatttaacacagactgcttcaagcaccgcaagggccatggaggaattgcaagaccaagagggctgggaatatgcttctctaattggctggaaatttcactggaaacaacgtagttcagataccttccgccgcagacgctggaggagaaaaatggctccttcagaaacacatggtgcagctgccatctttaaacttgaaggtgcccttggggcagacactaccgaagatggggatgagaagagcctggagaaacagaagcacagtgccaccactgtgttcggagcaaacacccccattgtttcctgcaattttgacagagtctacatctaccatctgcgctgctatgtctatcaagccagaaacctcttggctttagataaggatagcttttcagatccatatgctcatatctgtttcctccatcggagcaaaaccactgagatcatccattcaaccctgaatcccacgtgggaccaaacaattatattcgatgaagttgaaatctatggggaaccccaaacagttctacagaatccacccaaagttatcatggaactttttgacaatgaccaagtgggcaaagatgaatttttaggacgaagcattttctctcctgtggtgaaactgaactcagaaatggacatcacacccaaacttctctggcacccagtaatgaatggagacaaagcctgcggggatgttcttgtaactgcagagctgattctgaggggcaaggatggctccaaccttcccattcttccccctcaaagggcgccaaatctatacatggtcccccaggggatcaggcctgtggtccagctcactgccattgagattctagcttggggcttaagaaatatgaaaaacttccagatggcttctatcacatcccccagtcttgttgtggagtgtggaggagaaagggtggaatcggtggtgatcaaaaaccttaagaagacacccaactttccaagttctgttctcttcatgaaagtgttcttgcccaaggaggaattgtacatgcccccactggtgatcaaggtcatcgaccacaggcagtttgggcggaagcctgtcgtcggccagtgcaccatcgagcgcctggaccgctttcgctgtgacccttatgcagggaaagaggacatcgtcccacagctcaaagcctcccttctgtctgccccaccatgccgggacatcgttatcgaaatggaagacaccaaaccattactggcttctaagctgacagaaaaggaggaagaaatcgtggactggtggagtaaattttatgcttcctcaggggaacatgaaaaatgcggacagtatattcagaaaggctattccaagctcaagatatataattgtgaactagaaaatgtagcagaatttgagggcctgacagacttctcagatacgttcaagttgtaccgaggcaagtcggatgaaaatgaagatccttctgtggttggagagtttaagggctcctttcggatctaccctctgccggatgaccccagcgtgccagcccctcccagacagtttcgggaattacctgacagcgtcccacaggaatgcacggttaggatttacattgttcgaggcttagagctccagccccaggacaacaatggcctgtgtgacccttacataaaaataacactgggcaaaaaagtcattgaagaccgagatcactacattcccaacactctcaacccagtctttggcaggatgtacgaactgagctgctacttacctcaagaaaaagacctgaaaatttctgtctatgattatgacacctttacccgggatgaaaaagtaggagaaacaattattgatctggaaaaccgattcctttcccgctttgggtcccactgcggcataccagaggagtactgtgtttctggagtcaatacctggcgagatcaactgagaccaacacagctgcttcaaaatgtcgccagattcaaaggcttcccacaacccatcctttccgaagatgggagtagaatcagatatggaggacgagactacagcttggatgaatttgaagccaacaaaatcctgcaccagcacctcggggcccctgaagagcggcttgctcttcacatcctcaggactcaggggctggtccctgagcacgtggaaacaaggactttgcacagcaccttccagcccaacatttcccagggaaaacttcagatgtgggtggatgttttccccaagagtttggggccaccaggccctcctttcaacatcacaccccggaaagccaagaaatactacctgcgtgtgatcatctggaacaccaaggacgttatcttggacgagaaaagcatcacaggagaggaaatgagtgacatctacgtcaaaggctggattcctggcaatgaagaaaacaaacagaaaacagatgtccattacagatctttggatggtgaagggaattttaactggcgatttgttttcccgtttgactaccttccagccgaacaactctgtatcgttgcgaaaaaagagcatttctggagtattgaccaaacggaatttcgaatcccacccaggctgatcattcagatatgggacaatgacaagttttctctggatgactacttgggtttcctagaacttgacttgcgtcacacgatcattcctgcaaaatcaccagagaaatgcaggttggacatgattccggacctcaaagccatgaacccccttaaagccaagacagcctccctctttgagcagaagtccatgaaaggatggtggccatgctacgcagagaaagatggcgcccgcgtaatggctgggaaagtggagatgacattggaaatcctcaacgagaaggaggccgacgagaggccagccgggaaggggcgggacgaacccaacatgaaccccaagctggacttaccaaatcgaccagaaacctccttcctctggttcaccaacccatgcaagaccatgaagttcatcgtgtggcgccgctttaagtgggtcatcatcggcttgctgttcctgcttatcctgctgctcttcgtggccgtgctcctctactctttgccgaactatttgtcaatgaagattgtaaagccaaatgtgtaacaaaggcaaaggcttcatttcaagagtcatccagcaatgagagaatcctgcctctgtagaccaacatccagtgtgattttgtgtctgagaccacaccccagtagcaggttacgccatgtcaccgagccccattgattcccagagggtcttagtcctggaaagtcaggccaacaagcaacgtttgcatcatgttatctcttaagtattaaaagttttattttctaaagtttaaatcatgtttttcaaaatatttttcaaggtggctggttccatttaaaaatcatctttttatatgtgtcttcggttctagacttcagcttttggaaattgctaaatagaattcaaaaatctctgcatcctgaggtgatatacttcatatttgtaatcaactgaaagagctgtgcattataaaatcagttagaatagttagaacaattcttatttatgcccacaaccattgctatattttgtatggatgtcataaaagtctatttaacctctgtaatgaaactaaataaaaatgtttcacctttaaaaaaaaaaaaaaaaaaaaaa

SEQ ID NO: 35 - DNA, 493 bp, Homo Sapiens
aagcattcagaaggcacacatacttacacttgccctgagacttagttcgaaatgtgaaatatgatttggcgaggaagatcaacatataggcctaggccgaggagaagtgtaccacctcctgagctgattgggcctatgctggagcccggtgatgaggagcctcagcaagaggaaccaccaactgaaagtcgggatcctgcacctggtcaggagagagaagaagatcagggtgcagctgagactcaagtgcctgacctggaagctgatctccaggagctgtctcagtcaaagactgggggtgaatgtggaaatggtcctgatgaccaggggaagattctgccaaaatcagaacaatttaaaatgccagaaggaggtgacaggcaaccacaggtttaaatgaagacaagctgaaacaacacaaaactgtttttatctaagatatttgacttaaaaatatcgaaataaacttttgcagctttctccaaaaaaaaaa

SEQ ID NO: 36 - DNA, 3294 bp, Homo Sapiens
cagaatccaggggacggttgctgagcgggcctgggacagcgggtcgcggcacctccggcctgcgcgtgtctaatccgtctgtcgggtcccgaaagagctaagccgagcctgcgccggacgggtgggctggactgagagaattctctgagctggtgacaggtgccacaggcactggggatctcaccagaaaggaaccgacggagctaggggccagcgagatggcggacgaggccttagctgggctggatgagggagcccttcggaagctgctggaggtcacagcagatctggcagagcggcggcgcatccgctcagccatccgggaactgcagcggcaggagctggagcgcgaggaggaggccctggcatccaagcgtttccgtgccgagcggcaggacaacaaggagaactggctgcactctcagcagcgggaagctgagcagcgggctgccctggcacggctggcagggcagctggagtccatgaacgatgtggaggaattgactgcactgttgcgaagcgctggtgagtatgaggagcgcaagctgatccgagctgccatccgccgtgtacgggctcaggagattgaggctgccaccttggctgggaggttgtacagcgggcgtcccaacagtggctcaagagaggacagcaaggggctagcggcacacaggctggaacagtgtgaggtgccagagcgagaggaacaggaacagcaggcagaggtttcaaagccaacccccacccctgaaggcaccagccaggatgtgaccacagtgacactcctgctgcgagccccacctgggagcacatccagctcacctgcctcacccagcagttcacccacccctgcctctcctgagcctccattggagcctgccgaggcccagtgccttacagctgaggttccaggcagcccagagccaccccccagcccacccaagaccaccagccctgagcctcaggagtctccaacgctccccagcactgagggccaggtggtcaacaagcttctgtctggccccaaagagacccctgctgcccagagccccaccagaggcccctctgacaccaagagagcagacgtggctggaccccgaccctgccaacgctccctgtcggtgctcagcccccgccaaccagcccagaaccgagagtccaccccccttgccagcggaccttcctcattccagcgggctggctctgtgcgggatcgtgtccacaagttcacatctgattctcctatggctgctaggctccaggatggcacaccccaggctgccctaagtcccctgacccccgcaaggctcctgggcccctccctcaccagcaccacccctgcctcctcctccagcggctcctcctctcggggccccagtgatacctcctcccggttcagcaaggagcaacgaggagtagcccagcccctggcccagcttcgaagctgcccccaggaggagggccccagggggcggggcttggctgctaggccccttgaaaacagagcaggggggcctgtggcacgttcagaggagcctggtgccccgctgcccgtggccgtcggcactgccgagccagggggcagtatgaagaccacattcaccatcgagatcaaggacggccgtggccaggcctccacaggccgggtgctgctgcccacaggcaaccagagggcagaactgacactggggctgcgggcgcccccgaccctactcagcaccagtagtgggggcaagagcaccatcacccgtgtcaacagccctgggaccctggctcggctgggcagtgtcactcatgtcaccagcttcagccatgccccccccagtagccgaggaggctgcagcatcaagatggaagcagagccagcagagcctctcgctgcagcagtggaagcggccaatggggctgagcagacccgagtgaacaaagcaccagaagggcggagccctctgagcgctgaggagctgatgactattgaggatgaaggagtcttggacaagatgctggatcagagcacggactttgaagagcggaagctcatccgggctgcacttcgtgagctccgacaaaggaagagagaccagcgggacaaggagcgggaacggcggctgcaggaggcacggggccggccaggggaggggcgcggcaacacagccactgagaccaccacgaggcacagccagcgggcagctgatggctctgctgtcagcactgttaccaagactgagcggctcgtccactccaatgatggcacacggacggcccgcaccaccacagtggagtcgagtttcgtgaggcgctcggagaatggcagtggcagcaccatgatgcaaaccaagaccttctcctcttcctcctcatccaagaagatgggcagcatcttcgaccgcgaggaccaggccagcccacgggccggcagcctggcggcgctcgagaaacggcaggccgagaagaagaaagagctgatgaaggcgcagagtctgcccaagacctcagcctcccaggcgcgcaaggccatgattgagaagctggagaaggagggcgcggccggcagccctggcggaccccgcgcagccgtgcagcgatccaccagcttcggggtccccaacgccaacagcatcaagcagatgctgctggactggtgtcgagccaagactcgcggctacgagcacgtcgacatccagaacttctcctccagctggagtgatgggatggccttctgtgccctggtgcacaacttcttccctgaggccttcgactatgggcagcttagccctcagaaccgacgccagaacttcgaggtggccttctcatctgcggagacccatgcggactgcccgcagctcctggatacagaggacatggtgcggcttcgagagcctgactggaagtgcgtgtacacgtacatccaggaattctaccgctgtctggtccagaaggggctggtaaaaaccaaaaagtcctaacccctgctcggggccccacggatgctggtggactgtgtgcccctggtggaggtggacgacatgatgatcatgggcaagaagcctgaccccaagtgtgtcttcacctatgtgcagtcgctctacaaccacctgcgacgccacgaactgcgcctgcgcggcaagaatgtctagcctgcccgcccgcatggccagccagtggcaagctgccgcccccactctccgggcaccgtctcctgcctgtgcgtccgcccaccgctgccctgtctgttgcgacaccctcccccccacatacacacgcagcgttttgataaattattggttttcaacg

SEQ ID NO: 37 - DNA, 3163 bp, Homo Sapiens
cctttgccctgaagggggctggatgggcaaggcggccgcgatggctcgagctcgggcggtggcggcggtggccggaggcggcggtgcctcctcctcctcgccccggcgccggcggtgatccgagcgagcggccgcggcccccgatgagactgctggcgggctggctgtgcctgagcctggcgtccgtgtggctggcgcggaggatgtggacgctgcggagcccgctcacccgctccctgtacgtgaacatgactagcggcccgggtgggccggcggcggccgcgggcggcaggaaggagaaccaccagtggtatgtgtgcaacagagagaaattatgcgaatcactccaggctgtctttgttcagagttaccttgatcaaggaacacagatcttcttaaacaacagcattgagaaatcgggctggctatttatccaattatatcattcttttgtgtcatctgtttttagcctgtttatgtctagaacatctatcaatgggttgctaggaagaggctcaatgtttgtgttttcaccagatcagtttcagagactgcttaaaattaatccagactggaaaacccacagacttcttgatttaggtgctggagatggagaagtcacaaaaatcatgagccctcattttgaagaaatctatgccactgagctttctgaaactatgatatggcagcttcagaaaaagaaatacagagtccttggtataaatgaatggcagaatacggggttccagtatgatgtcatcagctgcctgaacttgctggaccgctgtgatcagcccctgactttgttaaaagatatcagaagtgtcttggagccaactagaggcagggtcatccttgcccttgtcctcccctttcatccctatgtggaaaacgtaggtggcaagtgggagaaaccatcagaaattttggaaatcaaaggacagaactgggaagaacaagtgaatagtctgcctgaagttttcagaaaagctggttttgttatcgaagctttcaccagactaccatacctgtgtgaaggcgacatgtataatgactactacgttctggatgacgctgtctttgttctcaaaccagtataaacacgtggaggtcgaagtcttcagagtccgcaccctccgggatgtgcccttggaagagggtctgtgttcacaattacgtgaagggaggacccttggggaccgccattctaaatatcatgtaggaatttaaaaagccaaaatactaattatttctttgtagtgtgtaaaggaatgtttttaaaagacaaaaacccaactctttgtggatttttatcaactctttactcagagccactctccaatgcaggtcacactccaattatgatggaagatattttttatacttaattgcagtagggactcattcccagacaaagcaatagtcacgacttcatggaaccaatcaatggattgttttttgaagactggcaataaagctgtccattcaattccaaatactggttttaaggtatagccactgatattctttcatgtttagaaattctttctgttattattcaagaaaatgtttttaatcatgctaataaacttttttggagatgactttggcatcatgtttgaattcatataaagctcccctagcattttttattggtttggcttcaggagtacccaaatagtagcattatgagaatgacgcagacaatttgaataggggggaaggaaggcttcagacttgggggaaggggagattattgcaaattgcagtgaacactgagtcagtaaaaaaaaaaaacagaaacaaaaacccagcctcattcagatacagaacttcagggacccctccccccacccccccagttaatgctgctgtgaaaaatgcaaaataacctggttctgactttgtgatcactcatgtcccatacactgaactttgtttttttctggacaatctcaggttctcagaattgaaacattcagttttgtctactgacaaaatgcaactaaaaatgttttaattcaacttcttactctacacttatatacctctctcccagagcttggctcttccctgaaatccttaaaggagtttattatttgccaagaatatggtttgatgaagaccgtgtcagactcatgcattctggaatccgtgagtgcctccaaccataaacccagaaatgctgccatagaggaacccattagcaagatcaataaccatcgtggatattccaaagagcagagcatttaacccagaatctgaaatctcagtaataacagaaatgtcaatatgagattgtggttattaacaatatgttatcctcactactttatttcttttttcatccaggtgtttcattaagtattctcatttatatgctcatagaagtcatcagatcaacacattcactccaacacctgggtataaaggcgaattaaaacctgaagaattactttattattcattaagaactgcattcccacatcctcacaccaatatcttccactgttactgtgcagtcataataagagttgggttatgtgatttatgcaaaattgttattggtgtgttctaatgatttttttccaggaattcaagtaagtgaagtacaaatacttagcaccatagattgtaaaaatagaaagaggaaatgagaaaacttaatgtcgttcttgtacagttgagttttgcttctttataaactgtctgttaaaatcaggggttgctgttagactgtcaagcagaagtgatggatgttcaaggaggcaggttgccccaaagtgttttctaactttcaagtagagaactttatgctctaataagaaaaatacaactcattcttaaccacccccccaaaacagagaaaacacatacatttatgcattttaaagataaaaagtagtttctcaaaaaaatctgaagttctctgaaaaccagcttattaaaagtgctgttttgtggtgaaaattgaaaccaaatccactcacatttcctatcgggtcttgaaattcttggtggtgtgtcaccattccactagatggcagtgttgcttactgagtgtcaatggcttttttccccgtaaatggaatcatgtttttctcccccaaagtacaataaagctgccttgtctgcaccaaaaacaaaaaaaaaaaaaaaaaaa

SEQ ID NO: 38 - DNA, 5539 bp, Homo Sapiens
ggagggaggccgggcaggcggctgagcggcgcggctctcaacgtgacggggaagtggttcgggcggccgcggcttactaccccagggcgaacggacggacgacggaggcgggagccggtagccgagccgggcgacctagagaacgagcgggtcaggctcagcgtcggccactctgtcggtccgctgaatgaagtgcccgcccctctaagcccggagcccggcgctttccccgcaagatggacggtttcgccggcagtctcgatgatagtatttctgctgcaagtacttctgatgttcaagatcgcctgtcagctcttgagtcacgagttcagcaacaagaagatgaaatcactgtgctaaaggcggctttggctgatgttttgaggcgtcttgcaatctctgaagatcatgtggcctcagtgaaaaaatcagtctcaagtaaaggccaaccaagccctcgagcagttattcccatgtcctgtataaccaatggaagtggtgcaaacagaaaaccaagtcataccagtgctgtctcaattgcaggaaaagaaactctttcatctgctgctaaaagtggtacagaaaaaaagaaagaaaaaccacaaggacagagagaaaaaaaagaggaatctcattctaatgatcaaagtccacaaattcgagcatcaccttctccccagccctcttcacaacctctccaaatacacagacaaactccagaaagcaagaatgctactcccaccaaaagcataaaacgaccatcaccagctgaaaagtcacataattcttgggaaaattcagatgatagccgtaataaattgtcgaaaataccttcaacacccaaattaataccaaaagttaccaaaactgcagacaagcataaagatgtcatcatcaaccaagaaggagaatatattaaaatgtttatgcgcggtcggccaattaccatgttcattccttccgatgttgacaactatgatgacatcagaacggaactgcctcctgagaagctcaaactggagtgggcatatggttatcgaggaaaggactgtagagctaatgtttaccttcttccgaccggggaaatagtttatttcattgcatcagtagtagtactatttaattatgaggagagaactcagcgacactacctgggccatacagactgtgtgaaatgccttgctatacatcctgacaaaattaggattgcaactggacagatagctggcgtggataaagatggaaggcctctacaaccccacgtcagagtgtgggattctgttactctatccacactgcagattattggacttggcacttttgagcgtggagtaggatgcctggatttttcaaaagcagattcaggtgttcatttatgtgttattgatgactccaatgagcatatgcttactgtatgggactggcagaagaaagcaaaaggagcagaaataaagacaacaaatgaagttgttttggctgtggagtttcacccaacagatgcaaataccataattacatgcggtaaatctcatattttcttctggacctggagcggcaattcactaacaagaaaacagggaatttttgggaaatatgaaaagccaaaatttgtgcagtgtttagcattcttggggaatggagatgttcttactggagactcaggtggagtcatgcttatatggagcaaaactactgtagagcccacacctgggaaaggacctaaaggtgtatatcaaatcagcaaacaaatcaaagctcatgatggcagtgtgttcacactttgtcagatgagaaatgggatgttattaactggaggagggaaagacagaaaaataattctgtgggatcatgatctgaatcctgaaagagaaatagaggttcctgatcagtatggcacaatcagagctgtagcagaaggaaaggcagatcaatttttagtaggcacatcacgaaactttattttacgaggaacatttaatgatggcttccaaatagaagtacagggtcatacagatgagctttggggtcttgccacacatcccttcaaagatttgctcttgacatgtgctcaggacaggcaggtgtgcctgtggaactcaatggaacacaggctggaatggaccaggctggtagatgaaccaggacactgtgcagattttcatccaagtggcacagtggtggccataggaacgcactcaggcaggtggtttgttctggatgcagaaaccagagatctagtttctatccacacagacgggaatgaacagctctctgtgatgcgctactcaatagatggtaccttcctggctgtaggatctcatgacaactttatttacctctatgtagtctctgaaaatggaagaaaatatagcagatatggaaggtgcactggacattccagctacatcacacaccttgactggtccccagacaacaagtatataatgtctaactcgggagactatgaaatattgtactgggacattccaaatggctgcaaactaatcaggaatcgatcggattgtaaggacattgattggacgacatatacctgtgtgctaggatttcaagtatttggtgtctggccagaaggatctgatgggacagatatcaatgcactggtgcgatcccacaatagaaaggtgatagctgttgccgatgacttttgtaaagtccatctgtttcagtatccctgctccaaagcaaaggctcccagtcacaagtacagtgcccacagcagccatgtcaccaatgtcagttttactcacaatgacagtcacctgatatcaactggtggaaaagacatgagcatcattcagtggaaacttgtggaaaagttatctttgcctcagaatgagactgtagcggatactactctaaccaaagcccccgtctcttccactgaaagtgtcatccaatctaatactcccacaccgcctccttctcagcccttaaatgagacagctgaagaggaaagtagaataagcagttctcccacacttctggagaacagcctggaacaaactgtggagccaagtgaagaccacagcgaggaggagagtgaagagggcagcggagaccttggtgagcctctttatgaagagccatgcaacgagataagcaaggagcaggccaaagccacccttctggaggaccagcaagacccttcgccctcgtcctaacaccctggcttcagtgcaactcttttccttcagctgcatgtgattttgtgataaagttcaggtaacaggatgggcagtgatggagaatcactgttgattgagattttggtttccatgtgatttgttttcttcaatagtcttattttcagtctctcaaatacagccaacttaaagttttagtttggtgtttattgaaaattaaccaaacttaatactaggagaagactgaatcattaatgatgtctcacaaattactgtgtacctaagtggtgtgatgtaaatactggaaacaaaaacagcagttgcattgattttgaaaacaaacccccttgttatctgaacatgttttcttcaggaacaaccagaggtatcacaaacactgttactcatctactggctcagactgtactacttttttttttttttttcctgaaaaagaaaccagaaaaaaatgtactcttactgagataccctctcaccccaaatgtgtaatggaaaatttttaattaagaaaaacttcagttttgccaagtgcaatggtgttgccttctttaaaaaatgccgttttcttacactaccagtggatgtccagacatgctcttagtctactagagaggtgctgccttttctaagtcataatgaggaacagtcccttaatttcttgtgtgcaactctgttttatcctagaactaagagagcattggtttgttaaagagctttcaatgtatattaaaaccttcaatactcagaaatgatggattcctccaaggagtcctttactagcctaaacattctcaaatgtttgagattcaagtgaatggaaggaaaaccacatgcctttaaaactaaactgtaataattacctggctaatttcagctaagccttcatcataatttgttccctcagtaataggagaaatataaatacagtaagtttagattattgaattggtgcttgaaatttattggttttgttgtaattttatacagattatatgagggataagatactcatcaaattgcaaattcttttttttacagaagtgtgggtaacagtcacagcagttttttttaccaacagcatacttaacagacttgctgtgtagcagtttttttctggtggagttgctgtaagtcttgtaagtctaatgtggctatcctactcttttgggcaatgcatgtattatgcattggaaaggtattttttttaagttctgttggctagctatggttttcagtacatttcctactttaagagtaattactgacaaatatgtatttcctatatgtttatactttgattataaaaaagtattttgttttgattttttaacttgctgcattgttttgatactttctatttttttggtcaaatcatgtttagaaactttggatgagttaagaagtcttaagtatgcaggcgtttacgtgattgtgccattccaaagtgcatcagaactgtcattcccttctaatatcttctcaggagtaatacaaatcaggtatttcatcatcatttggtaatatgaaaactccagtgaactcccaaggacatttacaacatttatattcacacgctgtatggaagggtgtgggtgtgtgtgaaggggcgagtggagacactgtgtgtatctctagataagaagatatgcaccacgttgaaaatactcagtgtagatctctatgtgtataggtatctgtatatctttccttttgtttacaactgttaaaaaacctcaaaatagttctcttcaaaagaagagagattccaagcaacccatctttcttcagtatgtatgttctgtacatacttatcggagcgcgccagtaagtatcaggcatatatatctgtctgttagcaatgattattacatcatcagatcagcatgtgctatactccctgcaagaaatatactgacatgaacaggcagttcttggagaagaaagagcatttctttaagtacctggggaatacagctctcagtgatcagcagggagtttatttgaggacatcagtcacctttggggttgccatgtacaatgagatttataatcatgatactcttcggtggtagtttcaaaagacactactaatacgcaggaagcgttccagctatttaatgctggcaactactgtttaatggtcagttaaatctgtgataatggttggaagtgggtggggttatgaaattgtagatgtttttagaaaaacttgtgaatgaaaatgaatccaagtgtttcatgtgaagatgttgagccattgctatcatgcattcctgtctcatggcagaaaattttgaagattaaaaaataaaataatcaaaatgtttcctctttctaaaaaaaaaaaaaaaaaa

SEQ ID NO: 39 - DNA, 2030 bp, Homo Sapiens
tctccctgggagtcgcgcagagtggagtcaaaggcaaccagtgctcgctgcggtctctggggatcgggaccgcggcggcggcccgcgagcgggatgttccggggcttgagcagttggttgggcttgcagcagccggtggcaggcggtgggcagcccaatggagatgctccacccgagcagccgtccgagacggtggctgagtctgcggaggaggagctgcagcaagcgggagaccaggagctcctccaccaggccaaagacttcggcaactatttatttaactttgcatctgctgccacaaaaaagataactgaatcagttgctgaaacagcacaaacaataaagaaatccgtagaagaaggaaaaatagatggcatcattgacaagacaattataggagattttcagaaggaacagaaaaaatttgttgaagagcaacatacaaagaagtcagaagcagctgtgcccccatgggttgacactaacgatgaagaaacaattcaacaacaaattttggccttatcagctgacaagaggaatttccttcgtgaccctccggctggcgtgcaatttaatttcgactttgatcagatgtaccccgtggccctggtcatgctccaggaggatgagctgctaagcaagatgagatttgccctcgttcctaaacttgtgaaggaagaagtgttctggaggaactacttttaccgcgtctccctgattaagcagtcagcccagctcacggccctggctgcccaacagcaggccgcagggaaggaggagaagagcaatggcagagagcaagatttgccgctggcagaggcagtacggcccaaaacgccacccgttgtaatcaaatctcagcttaaaactcaagaggatgaggaagaaatttctactagcccaggtgtttctgagtttgtcagtgatgccttcgatgcctgtaacctaaatcaggaagatctaaggaaagaaatggagcaactagtgcttgacaaaaagcaagaggagacagccgtactggaagaggattctgcagattgggaaaaagaactgcagcaggaacttcaagaatatgaagtggtgacagaatctgaaaaacgagatgaaaactgggataaggaaatagagaaaatgcttcaagaggaaaattagctgttcctgaaatagaagaataatccttaacagtctgcaaactgacattaaattctagatgttgacaattactgaatcagaaggcatgaaagagtataattttatgaaattcaaaattattcttttttcaagttgaaacttgcctcttctactttaaaaaagtatatagaacagttacttctaataatcagaaagagatgttttatagaacatttctttaatataaagttagagatgtcttcataggcagtatggctatctttgccacagaaacataagtaaaattttagagttctgttttccatgaggtcaaaaatataatttattcctcagtcatggttttctaaatatctgtactccacattccattttaattgatatgagggtgttaaagtacctacttaatgggttgattattatcaaaatgaccaaattataccaaagaacttaagaggaagcactttcagaactattcacttgccaggtattttctaaaattccacctgaaagccaaaagataaaataaataacttgattttaatgatataagcatcacacaattttacattaagaaatactgtgcaggccatgcgtggtggctcaggcctgtaatcccagcactttgggaggccgaggtgggcagatcaccggaggtcaggagttcgagaccagccttgccaacatagtgaaaccctgtctttactaaaaatacaaaaattagccgggcatggtggcaggcacctgtaatcccaggtactagggaggcttttgaacccaggaggcagaggttgcagcgagctgagatcgcgccactgcactccagcctgggtgatagagtgagattcagtctcaaaaaaaaaaaaaaaaaaaaaaaaaaa

SEQ ID NO: 40 - DNA, 3824 bp, Homo Sapiens
gcggggctagagctgtcggagaagcgggaccgcgaggccggcgcgcggcgctctgcgcggtcagagggagcgcctggcagcagcaggagcagcagcagcagcccgcggcggggccgccgccagccgccgcgaccgccgcggctgcagcctccgaagggaggccgggtgagccggcgtacgcactttcccgcggactttcggagtgtttgtggatatacatgccaagccgccacgatgatgtccatgaacagcaagcagcctcactttgccatgcatcccaccctccctgagcacaagtacccgtcgctgcactccagctccgaggccatccggcgggcctgcctgcccacgccgccgctgcagagcaacctcttcgccagcctggacgagacgctgctggcgcgggccgaggcgctggcggccgtggacatcgccgtgtcccagggcaagagccatcctttcaagccggacgccacgtaccacacgatgaacagcgtgccgtgcacgtccacttccacggtgcctctggcgcaccaccaccaccaccaccaccaccaccaggcgctcgaacccggcgatctgctggaccacatctcctcgccgtcgctcgcgctcatggccggcgcgggcggcgcgggcgcggcggccggcggcggcggcgcccacgacggcccggggggcggtggcggcccgggcggcggcggcggcccgggcggcggcggccccgggggaggcggcggtggcggcccggggggcggcggcggcggcccgggcggcgggctcctgggcggctccgcgcaccctcacccgcatatgcacagcctgggccacctgtcgcaccccgcggcggcggccgccatgaacatgccgtccgggctgccgcaccccgggctggtggcggcggcggcgcaccacggcgcggcagcggcagcggcggcggcgtcggccgggcaggtggcagcggcatcggcggcggcggccgtggtgggcgcagcgggcctggcgtccatctgcgactcggacacggacccgcgcgagctcgaggcgttcgcggagcgcttcaagcagcggcgcatcaagctgggcgtgacgcaggccgacgtgggctcggcgctggccaacctcaagatcccgggcgtgggctcactcagccagagcaccatctgcaggttcgagtcgctcacgctctcgcacaacaacatgatcgcgctcaagcccatcctgcaggcgtggctcgaggaggccgagggcgcccagcgcgagaaaatgaacaagcctgagctcttcaacggcggcgagaagaagcgcaagcggacttccatcgccgcgcccgagaagcgctccctcgaggcctacttcgccgtgcagccccggccctcgtccgagaagatcgccgccatcgccgagaaactggacctcaaaaagaacgtggtgcgggtgtggttttgcaaccagagacagaagcagaagcggatgaaattctctgccacttactgagggggctgggaggtgtcgggcgggacagaatggggagctgaggaggcatttttggggggctttcctctgcttgcctcccctcggatttggagtgtccgttatcctgcctgcatttggggagtcccttctcgctctctttcctccacccattctctgattttcctgcctttgctgtcccctagccttgaggactggggtgctgggtgtggggattggagtatagggtaggggagaagggggggagcattcgggggagtggggagtggggggaaggaaagcggagacccgagcaggggttttaaggagcaggatggttctggggtttgggtggggggagacgcgggaagggtaggaaaatggactgtttctgaccagagacacttacctaaatatcctggggaccaaggaactatgtacaaaaacaaacctaccaaccaccaaaaactagacaaataaagacaaactaaaacaaaacagaacaaaagcaaaggaaaatgctttagaaattttaactccggggagccataatctgcaacttcattttcccccatagaagagaaaaaagagcaccaccattattaccacctccccaaccctacacgcacgaactgagtcgaaaaacgaaaaccaaacgagcgagaagttgaagttctgggtatcaaagctagttgttctgtctgcgtgtttaatttttccctctctcacctccaccccatccatatcctctttatttcctccgttccaatgagaggcctatggctgctctccaatcccgggaagtgagtgggagcacagctgaaaagagagggtcagggggaggctggctgcttgcttaggtggaatccaacttttcccgtggccctgcctatactctggtggcctggtcctgttggggtgggggtctttggagagaagggcatagtctttgagctactaaaaagcagaattccggagcttcgagatatcttattctaggaaaatgaaacaattttaacaacagttttttttcctcttatgtcgaagatctagttttagacaatttcaaaataagcttttcccactcatagaactttaacttgccctttcagttttatcttttttttagagagaggtttaaactactgatttttcctgttgattcaaatagactaatggggtgaaagttattaggagagatactctctcctgttttctccactgaacgagactcatcttgctcttctaggtcccgtttcttcctctcttggaggacatgaaattatagaaatgttgagaagttcctgctttcttttgcggtaggacttggctgtgagaaaatcacctaaatcccagaaaagaggaagacagatttaaagtgcccccacccccatttgtttcaaagaggtctgcatgttgggcgaaaacagaacaactgtgtttccttttacttgttcttattattcaagagtcatttattacaggggataaatgttgggtagcaagaactttaatttgcactaccagtctcccaaatagaaaatcatgtatagtatttcatagtaataatcaggtaccttacaagctgctggtggattttaaaaaattaagatagttgaaggtggttaggtaaaatgcctgctttgtgtacaagatactctttggatctctcgtagagatggtttgttaccatcctttaatcataactaaaacattgaaaacagaacaaatgagaaaagaaaaaaaacctgccgattaacaagactgaaatcatgcatgatctgaaaggtgtggaaagaaacacaattaggtctcactctggttaggcattatttatttaattatgttgtatatcattgtttgcagggcaaacattctatgcatttgaaactgagcactaaactgggctagctttctggtagaccgttttgtggctagtgcgatttcacagtctactgcctgtttccactgaaaacatttttgtcatattcttgtattcaaagaaaacaggaaaaaagttattgtaaatattttatttaatgcacacattcacacagtggtaacagactgccagtgttcatcctgaaatgtctcacggattgatctacctgtctatgtatgtctgctgagctttctccttggttatgttttttctcttttacctttctcctcccttacttctatcagaaccaattctatgcgccaaatacaacagggggatgtgtcccagtacacttacaaaataaaacataactgaaagaagagcagttttatgatttgggtgcgtttttgtgtttatactgggccaggtcctggtagaacctttcaacaaacaaccaaacaaaaaaaaa

SEQ ID NO: 41 - DNA, 3285 bp, Homo Sapiens
aaaaaggacagcgagcggggagccccgaggacccccttttccctgcccagggattgagctccagagcctgttagggagctacccagacaggctttagttcctaaagtgctgaggaaacgcacggggcggtaaaggggaggctcgtcggtgagatggcgccggatctcgcttctcagaggcattcagagagcttccccagcgtgaactctcggccgaatgtaattttgccaggccgcgagggacgcagagaggggctgccaccaggcgggggcacgcgcggtagtcttgtccctacccgcccggtgccgccgtccccggctcccctcgggacgagtccgtacagctggagccgttccggacccggaaggggcggtggcgcagggtcctcgcgcgtcccacgtggggtcccgggcccagcagtctgcgcaccgggctcgctgctgcaccacgcgtcacccacgcagaccatggcagccgccgacggttcgctcttcgacaaccccaggacgttctccagacgtcccccagcccaggcgagtcggcaagcaaaggctacgaaaagaaaataccaagcgtccagtgaggctcccccagcgaaacggaggaacgaaacttcatttctcccagccaagaaaactagtgttaaagaaactcagaggacttttaaggggaacgcacaaaaaatgttttctccaaagaagcattcggttagcacaagtgatagaaaccaggaggagagacagtgcattaagacttcatcactgtttaaaaacaaccctgacattccagaactccacagacctgtggtaaagcaggtgcaagaaaaagtgtttacttcagctgcttttcatgagctgggcctccacccacatttaatttccacaataaatacggtcttaaaaatgtctagtatgaccagtgttcagaagcaaagtattcctgtgttgctggaaggcagagatgctctcgtgagatcccagacgggctcaggtaaaactcttgcctattgcatccctgtggtccagtcccttcaagcaatggagtcaaaaatacagcgcagtgatggcccctatgccctggtgctcgtgccaacgagagagctagctctacaaagctttgacactgtccagaaactgcttaagcctttcacctggattgtgcctggagtgttaatgggaggagagaagagaaaatcagaaaaggccagactccgcaaaggaataaatatccttatctcaactcctggacgcctggtggatcatataaaatccacaaagaacattcattttagtcggctgcggtggttggtgtttgatgaagcagacagaatcttggatttgggttttgaaaaggacatcacagtgatacttaatgctgtaaatgctgaatgccaaaaacgacagaatgtcttgctatcagcgacactcacagaaggtgtaacgcggctagctgatatcagtttgcatgatccagtcagtatttctgtcctggacaagagccatgaccagttgaacccaaaggacaaagcggtccaggaggtctgtcctccaccagctggcgacaagctggacagctttgcaataccagagagtctcaagcagcatgtgactgtggttcccagcaaactgaggcttgtctgcctagcggccttcatccttcagaaatgcaagtttgaggaagaccagaagatggttgtctttttctcaagttgcgagctggtggagttccactacagcctcttcctacagaccctgctgagcagctcaggggcgccggcatcagggcagttgccatctgcctccatgcgattaaaattcctacggctgcatggcggcatggagcaggaggaaagaacagcagtgtttcaggaattttcacattccagaagaggcgtccttctttgcacggatgttgcagctcggggcttagatctccctcaagtcacgtggattgttcagtacaacgctccatcttcacctgcagaatacatccaccggattggaagaaccgcccggattggctgccatgggagcagcctgctcattttggctccttcggaggcagaatatgtcaactcgttggcttctcacaaaatcaacgtttctgagattaagatggaagatattttgtgtgttctgacaagagatgattgttttaaagggaaacgatggggagcccagaaatcccatgctgttggcccccaggaaatccgagagcgagccacagtcttgcagacggtatttgaagattacgtgcactccagtgagaggagggtctcctgggcaaagaaagctctgcagtccttcatccaagcctacgccacctaccccagggagctgaagcacatcttccacgtccgatccctccaccttgggcatgtggcgaagagcttcggactaagagatgcccccaggaatcttagtgccttgactagaaagaagaggaaagcacacgtgaaaaggcctgaccttcataagaagacccagagtaaacacagcctcgctgaaatcctacgttcggaatactcaagcggcatggaggccgacatcgccaaggtcaaaaagcaaaacgcacctggagagcctggtggccggcccctgcagcacagtctgcagccgacaccctgctttggccgtgggaaaacattaaaatggagaaaaacccaaaaaggtgtacagcgggacagcaagacttcccagaaagtttaaaatctctctgggtcttcgagtggaacctggaagccccgggtggcagtggattgatgtccagttcttgtcagaggaggcttgtgaaaaataactgcgcctttgcctgaataccacgtccccaagaatcagaggggccacagcccttctcctccatgggaggccctggagcctgatagaaatcagtggtgtggggcactgtagagactagccagctcccgacggaaggggtctgtgtcttgtattgatcccatcagtgcccggcactcccttcacccaggtgctgacgtgccggggttgagctggcaccccgggatgtgatgtaagaacgccctgcgcgtcagcctggaacgggcttgattgctgcccttaactgtgttctgaagtttcacagcttggcttcagcctatcagcgcatacattggcatgaattttgtgaattagggtgttaaaaactggaattgaatttgtacaaaaagagaatatatttatcactaattattttcttaatgtaggaatgtaccgttaaaaaggaccaaaagtttttggtctgggtcaaaaaatacgaatgtgttctcag

SEQ ID NO: 42 - DNA, 1690 bp, Homo Sapiens
gggggcgacggccgctgtgacgctgcggcggcggcgggcgggcggcggcgcgtgagacgcgcgatccccggtgtcttgggagcagtgccccggcccccgccgctcccgccgccgccatgtcgggccggtcggtccgggcggagacccgcagccgggccaaggacgacatcaagaaggtgatggcggccatcgagaaagtgcggaaatgggagaagaagtgggtgactgtgggtgacacgtccctgaggatatttaagtgggttcctgtgacagacagcaaggagaaagaaaagtcaaaatcgaacagttcagcagcccgagaacctaatggctttccttctgatgcctcagccaattcctctctccttcttgaattccaggacgaaaacagcaaccagagttccgtgtctgacgtctatcagcttaaggtggacagcagcaccaactcaagccccagcccccagcagagtgagtccctgagcccagcacacacctccgacttccgcacggatgactcccagcccccaacgctgggccaggagatcctggaggagccctccctgccctcctcggaagttgctgatgaacctcctaccctcaccaaggaagaaccagttccactagagacacaggtcgttgaggaagaggaagactcaggtgccccgcccctgaagcgcttctgtgtggaccaacccacagtgccgcagacggcgtcagaaagctagcaccatcccggccctccgcctcctggccctgcctctatttattgcattctggttctggccgcgccgcgttgctggggtaagggcaagcactggggtcaagagcctgcacacatgagccttccgggctggaaggctggcgtaggacttggggctgtagcatcatcttcctgaccctggcacctgtgtctacttgctcccgagaagaggagcgctcatgtcttttttgcaccccaagttggctggagcatcggccaccccaagattcatctgtgacctccaggcagcagtctctgctccagaatctctggacggagctgctggcagcttctgcgagaagagagagatgtggaaggcaccttctagaagagagcgtgcctcaggttacttgaacttgaacggagactgtagactcccggactttcccctaggactgggggccctgtaggctgctgttggaggactgggtagagacattggagggaagggaagggcttttctccacacaagggcagagagtccgtctagatttcttgctgtcctgccagctctgcccatgcctgaggtggtcctacctctcacgggcaccctagctgctgacagccctttgtggccgccgtccccatcccctgccctcagcacacacatctgcacacacgcagctttgttctcacctctacctgtcattccagcatccctgcctcttgtcacaaactgccccagcaagaatttgaggttctgacaacagtacccatcccccacagtaccccttcagctcagtttctagaaagctcccttttctttgaaatctgcatgttgaattgaactttgtgattttattttttgtttcaaaaaagtttaagaaaatggaaatgggcaacagtgagtgaagacatattttagcactgaatagaatatttttaaaattaaactgtttgaaatatgaaaaaaaaaaaaaaaaaaaaaaa

SEQ ID NO: 43 - DNA, 2284 bp, Homo Sapiens
gccgggtggatggtactgctgcatccgggtgtctggaggctgtggccgttttgttttcttggctaaaatcgggggagtgaggcgggccggcgcggcgcgacaccgggctccggaaccactgcacgacggggctggactgacctgaaaaaaatgtctggatttctagagggcttgagatgctcagaatgcattgactggggggaaaagcgcaatactattgcttccattgctgctggtgtactattttttacaggctggtggattatcatagatgcagctgttatttatcccaccatgaaagatttcaaccactcataccatgcctgtggtgttatagcaaccatagccttcctaatgattaatgcagtatcgaatggacaagtccgaggtgatagttacagtgaaggttgtctgggtcaaacaggtgctcgcatttggcttttcgttggtttcatgttggcctttggatctctgattgcatctatgtggattctttttggaggttatgttgctaaagaaaaagacatagtataccctggaattgctgtatttttccagaatgccttcatcttttttggagggctggtttttaagtttggccgcactgaagacttatggcagtgaacacatctgatttcccacagcacaacagccctgcatgggtttgtttgtttttttactgctcactcccaaccttttgtaatgccattttctaaacttatttctgagtgtagtctcagcttaaagttgtgtaatactaaaatcacgagaacacctaaacaacaaccaaaaatctattgtggtatgcacttgattaacttataaaatgttagaggaaactttcacatgaataatttttgtcaaattttatcatggtataatttgtaaaaataaaaagaaattacaaaagaaattatggatttgtcaatgtaagtatttgtcatatctgaggtccaaaaccacaatgaaagtgctctgaagatttaatgtgtttattcaaatgtggtctcttctgtgtcaaatgttaaatgaaatataaacattttttagtttttaaaatattccgtggtcaaaattcttcctcactataattggtatttacttttaccaaaaattctgtgaacatgtaatgtaactggcttttgagggtctcccaaggggtgagtggacgtgttggaagagagaagcaccatggtccagccaccaggctccctgtgtcccttccatgggaaggtcttccgctgtgcctctcattccaagggcaggaagatgtgactcagccatgacacgtggttctggtgggatgcacagtcactccacatccaccattgaaggaaaggaaaaaagggcagagacttgacactccagtcttagacaggggacaatttctttgtagttgttctgataataaactgggttccatgttgcatttcatctgtgtactgaaccactagcctaatagaccagcacggtcaactagaatgacaaacattagctactgggaactcttgttgtctcttcctcttcagaactcttgtccccccaggctccccacctctgcaagatgggatacactcttcaggaccacagtttgaaatgtctttcataaaatgtgctacaattagccttcggaatatttgctgggtgatttaaatgtgtgggtctcatttccatgctagccatggtcatctgacagtctctacgctgtgaatattgcctggtgatcaagactctcctcaaagaaatgacttgctgtcatcccacatgaactcctgatgttttttctacaaaagtccataaaatgtgaaaactggagaagatcttagaggttgaagcccaccttctcttttcacataggagggaacagaccatggaaatttaaacgacttcctcacggtcacagaactagttttttaatcctcaggcagtgcatccccccaccctacaactgagcacaacctctttccccacagtgcaattcagaatatgctcagggaatgccagccaccttgtaaaactgctgggagaaaagcatgattcccacaaggactaagtatcagtgatttgtaattttcctgttttgtattatctgctttgctgatgtagacaagagttaactgagtagcatgctttattaagcatgagaaagaatcttaagaattgtcaataaaattaacccaaaactttaataatgtgtctgtaaccaagaaaatattgatagcatcatcctaatgaaactaaacatttattttaaacttattaaattgactcttaaactaaaaaa

SEQ ID NO: 44 - DNA, 4256 bp, Homo Sapiens
tacgagcggctgtgaaggaaactgtttaaccggatcccattgtacccagagtgcagagccgcctttccagcatgcaggggctgctcagcgtttagtcacatcaagaaatagaacagaattcagccatggccccaagaaagagaggtggacgaggtatttcattcatcttttgctgtttccgaaataatgatcacccagaaatcacgtatcggctgcgaaatgatagcaactttgcgcttcagaccatggaaccagcattgcccatgccccctgtggaggagctggatgtcatgttcagtgaactggtggatgaactggacctcacagacaaacacagagaagccatgtttgcacttccagctgagaaaaaatggcaaatatactgtagcaagaaaaaggaccaggaagaaaacaagggagctacaagttggcctgaattctacattgatcagctcaattccatggctgctagaaaatctctgctggctttagagaaggaagaagaagaagaaagaagtaaaactatagagagtttaaagacagcactgaggacaaaaccaatgaggtttgtaaccagattcatcgacttggatggcctatcatgtatcctcaactttctaaagaccatggactacgagacctcagagtctcgaatacatacttctctcattggctgtataaaggcgttaatgaacaactctcaaggccgggctcacgtcctggctcattctgagagtattaatgtaattgctcagagtctgagcacagagaacattaaaacgaaggtggccgtgctggaaatcttgggcgccgtgtgcctggttcccgggggccacaagaaggttctgcaggccatgctgcactaccagaagtatgccagcgaaaggacccgctttcagacattaattaacgacttggataaaagcactgggcggtatcgagatgaagtgagtctcaagactgccatcatgtccttcattaatgcagtgctcagccaaggtgcaggagtggagagtttggactttagacttcatcttcgctatgaatttctgatgttaggaattcaacctgtaatagataaattaagggaacacgaaaattcaacattagataggcatttagacttttttgaaatgctccgaaatgaagatgaactagaatttgccaaaagatttgaactggttcacatagacacaaaaagtgcaactcagatgtttgagctgaccaggaagaggctgacacatagtgaagcttacccgcatttcatgtccatcctgcaccactgcctccaaatgccttacaagaggagtggcaacactgttcagtactggctactactagatagaattatacagcagatagttatccagaatgacaaaggacaggaccctgactccacacctttggaaaactttaatattaagaatgtcgtacgaatgttggttaatgaaaatgaagttaagcagtggaaagaacaagcggaaaaaatgagaaaagagcacaatgagctacaacagaaactggaaaagaaagaacgagaatgtgatgctaagactcaagagaaggaagagatgatgcagaccttaaataaaatgaaagagaaacttgaaaaggagactactgagcataagcaagtcaagcagcaggtggcggacctcacagcacagctccatgagctcagcaggagggccgtctgtgcttcaatcccaggtggaccctcgcctggagcaccaggagggccctttccttcctctgtgcctggatctctccttcctcccccaccacccccacctctaccaggtgggatgcttccccctccaccgcctcccctccctccaggtggccctcctcctcccccagggcctcctcccttaggggcaatcatgccacctcctggtgctccaatgggcctagcactgaagaagaaaagcattcctcagcccacaaatgccctgaaatccttcaactggtctaaactgcccgagaacaaactggaaggaacagtatggaccgaaattgatgatacaaaagtcttcaaaattctagatcttgaagacctggaaagaaccttctctgcctatcaaagacagcaggatttctttgtgaacagtaactccaagcagaaagaagcagatgccattgatgacactctgagttccaaacttaaagttaaagagctttcggtgattgatggtcggagagctcagaattgcaacatccttctatcgaggttgaaattatccaatgacgaaatcaaacgggcaattctaacaatggacgaacaggaagatctgcccaaggacatgttggaacagctcttgaaatttgttcctgaaaaaagtgacattgacctattggaggaacataaacacgaactggatcggatggccaaggctgataggttcctttttgagatgagccgaattaatcactatcagcaaaggttgcaatcgctgtacttcaaaaagaagtttgcagagcgtgtggcagaagtgaaacctaaagtggaagcaattcgttctggctcagaagaggtgtttaggagtggtgccctcaagcagttgctggaggtggttttggcatttggaaattatatgaataaaggtcaaagagggaatgcatatggattcaagatatctagcctaaacaaaattgctgacacaaaatccagcatcgacaaaaacattacccttttgcactatctcatcactattgtggaaaataagtaccccagtgttctcaatctaaatgaagaattgcgagatattcctcaagctgcgaaagtaaacatgactgagctggacaaagaaataagtaccttgagaagtggcttgaaagcagtagagacagagctggaatatcagaagtctcagcccccacagcccggagataagtttgtgtctgttgtcagccagttcatcacagtagccagcttcagcttctctgatgttgaagaccttctagcagaagctaaagacctgtttactaaagcagtgaagcactttggggaagaggctggcaaaatacaaccagatgagttctttggcatttttgatcaatttcttcaagctgtgtcagaagccaaacaagaaaacgaaaatatgagaaagaaaaaggaggaagaagaacgtcgagctcgcatggaagctcagctcaaagaacaacgtgaaagggaacgtaaaatgagaaaagctaaagagaatagtgaagaaagcggagagtttgatgaccttgtttcagctttacgctcaggagaagtgtttgacaaagacctttctaaattgaaacggaatcgcaaacgtattaccaaccagatgactgacagcagcagagagagaccaatcacaaaacttaatttctaattttccatgaatacttttttttagaaagctcattagcagccctctaaagtgactagaacgtttcattacactgccttgcaatccaaacagtggcaattttttccttcatctgtgagtgaatgtgtgaacgtgtgtatgtaaatgtatgtgtgtatatattaaaaaatgtatatagatgtctgagtgttgtctggagacctatacgtatggttaaaaagatttatgttaatgtatgtgctccaaaacctttcgtgtatgcattcacattgagtgtggctcattttctttccccgaacgccatgactgttcagaagcacaatactatctcctgaaagagataagagacattccctagattcaaaggcaaaacagaagaaacaaacaaacaaacaaacaaagcttgcaaaatattttatggtttccaagcttgatatcctttaaaattattttcattgatggaactggagttgttggaaaaacatagatttaaaatgatttttgatagctgacattgtgatgttgatgtatcacatcagtaataggaccagctttgaatttctgacattggtgtggggatacagtctgtaaatgtttattgagaacatcttgcacacaatttgaattatgtagaatgtcaatcaagtttttgtatatttaaaagttggacatcaattttttcccctgatttcatcaagttatctctgccaagtgctcttgataatttcttcagatttttggaaaaaaacactatataaatgcaatccatgctttttttaaagaacaacattgccagagtatgcttgttctaacaatatagatatataaaccttaaaaataataaaatatctcacccaagacttaaaggaagaattctctgaagggataaagattact

SEQ ID NO: 45 - DNA, 5285 bp, Homo Sapiens
gaagcgccgccgccaccgccgcctttgctgtcccccggcctctagttccccgcaggtgggaggtgggagccatgtcgaaacggctccggagcagcgaggtgtgcgctgactgcagcgggccggatccttcctgggcatcagtaaataggggaacgtttttatgtgatgagtgctgcagtgtccatcggagtctagggcgccatatctcccaagtgaggcatctgaaacacacaccgtggcctccaacactgcttcagatggttgagaccttgtataataacggtgctaactctatatgggagcattctttgctggaccctgcgtctattatgagtggaagacgtaaagctaatccacaggataaagtacatcccaataaagcggaattcatcagagccaagtatcagatgttagcgttcgtccatcgcttgccctgccgggatgacgatagtgtgactgccaaagatcttagcaagcaactccattcgagcgtgagaacagggaatcttgaaacctgtttgagactgttatctttaggagcacaagccaacttctttcatcctgaaaaaggaaacaccccactccatgttgcctccaaagcagggcagattttacaggctgaattattggcagtatatggagcagacccaggcacacaggattctagtgggaaaactcccgttgattatgcaaggcaaggagggcaccatgagctggcagagcgcctcgtggaaatacagtatgagctaacggacagactagccttctatctctgtggcaggaaaccagatcacaaaaatggacagcactttataatacctcaaatggcagacagcagcctggatttgtctgaattggcaaaagctgctaagaagaaacttcaatctctaagtaatcatttgtttgaagaacttgccatggatgtgtacgatgaagttgacaggcgagagacggatgcagtctggcttgccacgcaaaaccacagcgccctggtaaccgagacaacggtcgtcccctttcttccggtcaatcctgagtactcatcaacacgaaatcagggcagacagaagttagctcggttcaacgcccatgagtttgccacgctggtcattgacattctcagtgacgccaagaggagacagcagggcagttctctctcgggttcaaaagacaatgtggagctcatactgaaaaccatcaataaccagcacagcgttgagagtcaagacaacgatcagcccgactatgacagcgtggcatcagacgaagacacagatttggaaaccactgcaagcaaaacaaaccggcagaagcttcaaacactccagagtgaaaattcgaacctcaggaaacaggccacaaccaatgtatatcaggtgcaaactggttctgagtacacagacacttccaaccactcttccttaaagagacgtccgtctgcccggggcagtaggcccatgtccatgtacgagaccggatcaggtcagaaaccatatctcccaatgggagaagcgagccgccccgaagagagcaggatgagactccagcccttccccgcgcacgcatccaggctggagaagcagaacagcacacctgagagtgactacgacaacactcccaacgacatggagccagatggcatggggtcaagccgaaagggacggcaaagaagtatggtgtggccaggggatggcttggtaccagacacagcagaaccccatgtggccccaagccccactctccctagcaccgaagatgtcatcaggaagactgaacagatcaccaaaaacatacaggagctcttaagagcagcccaagaaaataaacatgacagttatattccctgctcagagaggatacacgtagctgttacagaaatggcagcattattccccaaaaaacccaagtctgatatggtgaggacttcccttcgtttactgacgtccagtgcctaccgactgcagtcagagtgcaagaagaccctcccaggggaccccggctcacccacagacgttcagctggtcacgcagcaggtcatccagtgtgcgtacgacatcgccaaggctgccaagcagctggttaccatcaccaccaaagagaacaacaactgacaagggcagggcaccgcctcctctgttttctaggctttataaagtccaatttcaaattcagacgcagaactcttcagatttctacaaaaagaaacatttaatgacggtttaaaactttttaaaagaaaactcagtattatttttgcatgttttctaaccaattttcaactatttaacccacttgccttattttgtgcctatttgctggtttagtttctgatgttcggttgtgttgtcaacaactgttgagttgatcacatacatccaaaagtatagtttcattgtctaaagtttgtgaaaacttttccatcccttaaaactccctgcctatggctgaaactataaatgaaatttttcataaaacattttcttgagagagttcagttaaaaaagaaaaaatcagcgtcatttgttccctgccaagcatcgtgcaataagtgaatttcctggcctacttcataatctctaagtttggggtatctccaagcatgtatgtagagaaaggactttgccgctttttaaaactagtgtcacagtctctcttgggaggaaacaatgaattggttcatttcttctcagtgttttaccctgttacatgttctgttatttaatgttgttatctcaagctcctatctcttgatgttttcttgtcatcttgaaggctccatggaatgagataaagcattgacccaccacaggacatctcatgaagccatgttcagggtaggagctccacgcacatcaccacccattgtcaggtgctctccctcacccctgtaagccagacagtttgttcaaaacctgcagcaaagagaagcatcagtctaacaagccagaactcattttgtgccacccatttaggtatcactaccatgaactatagggaaaagaaatcacctactccctgacactgtgttgtacccttcatccaaaagtcagcttgcttctctgaccacttacagctttctcacatgagttgcttcacatttttcatcatctttaaggacttcttataaggaaagatgtatcgtatcgcagtcatctgagttagtttctcctccatcacctcatgagtacttaaaaattagacatcaactttcaagagttccttagagagtgtgctctagctggctgcctgctaccccaaagctctgaaagagtaaggttgaagtgctggaacatgctcagattgttttttagttactcaaaagccccttcttgttctgaatgtgaaagctcttcccgttcctgcttactgcagccattctgtgtgtgtggttcagaccctggcctagggccggtgatgtggatgagtgaagggagccaggtacacggcagcagggcagaggagactatggggagcccaccgcctacacagtaggggcagtagcccccagctccacgcctgttgccatgtggaaaagtgggcctagggtggccacagctttgatttttcaagagacaagaaacctagatgttttttggtgccatctctccatttataaatgttggcaaccaatttgaacactttcagagaccatgtgcaggtgagctgtgtcctctaggctgccagctcacagcccccaccccagggccctgtaagctgtgcagtgtgagggcctggcttccccggacacacctggagcagcctctgagtcttacccgtaatggagccggccaaccctgtgtgttatgttgctgtcgctcctgtttttaaccatatgttctgtcccatagcagtcattcacacatgtgaagaagacacaagaatcaaagtacaagttgcctcaatacatgctaataactaagcttctattttcacaggactgatcgatgcacacctttatagcttgaccatatgctgtcatgaaagtagcaccccgacggtgcttgctttactaagtcaccgtgtgtggatgcttttgtcgcattttgcttcactgtgagtagcatgggaaaagggtccacgtctccaaaagactcttccacttgtttgtcccacagccctaagtgccacattgctgttggatgctcccgggatgccttctagaagggggcctcccaccttaagttcaggcgccatctgatagccttttctgcaggcttcatgtccttagctgaccctcctttatcttgcaaacccctgcccctgctgtcccagggaggacgggcttctgtagaggcttctgggaaatgagctgtctgcaggaggtgaagcagtgttttccttggaatgtttgaggacctgcaatagaagatgttgcctttatggccctagagaaagtcaaggaacatggggaccaacaaagcatttccagttgtaagaatatgtcagaagagtgctcggttagcccacggtgccaaaactccaaacaagttccccggtggaatgacgtggccattggagggctgcaggtcgtcctctctgtatgtgccccgcgcatttccttggcctcatctgagatctggtgtcagagttctctgctcctgttggcaaatcgcaccttatctgaacatttgttccagccaccttttgcacatggattccgtaccttgcactagcaatgtctaccttcagtaacgtcgttctttttcaccctgtattctcaatgatcccttcctccccatatgccacccttcccccaaagctgatagggcagaggtgcactttatgaaactggcacttgactgaacagaaggaaacagctgtacctctaagctcctttcacagaaatcgtcatctgccttggaatgcaaatagttcttatttgccaaagaacagtgaattgggcccaaagatcaaacacagcatttcatgtaatcagaattctaaacgcacaactcgggagctgtgcacggcttctcaagtgattcagttgcagaaccaagagcaaaactcgcctgtttttgtcctcaatggcacccatgagctttccaatagtatagttttctttctttccttgtcctggttgaaggtaacgtgttcctagaaaagaaaatgctgcataggaaaactgagatgccttttattccaacgtgtttgatccctgtcactcattattctgtactttttattgtacattctattcctgtaattattgtgccctttaagtgttgtaaaatcgttttggaatttgtgcctgctagttatgcaataaacaggctctacaagtg

SEQ ID NO: 46 - DNA, 1284 bp, Homo Sapiens
taactccttccctctttgcggattctagaacggaacctttttttaattcttcccagtagaaacgtaggaacaatttcgtgaacgcaatccggagtgcccaacatggcggcggccgtaaggtgcatgggtagagccttgatacatcatcaaaggcatagcctttccaagatggtttatcagacatcactttgttcttgttctgtaaacatccgagtgcccaacagacattttgctgctgctacaaagtctgcaaagaaaacaaaaaaaggtgctaaagaaaaaacaccagatgagaaaaaagatgaaatagaaaaaataaaagcatatccctatatggaaggcgaacctgaggatgatgtctatttaaaacgcttatacccgagacagatatatgaggtggagaaagctgttcacttacttaagaaatttcaaattcttgactttactagtccaaagcaaagtgtttatcttgatttgacactggatatggcactgggaaagaagaaaaacgtggagccatttaccagtgttcttagtttgccatacccatttgcttccgaaatcaataaagttgctgtatttacagagaatgcatcagaggtcaaaatagcggaagaaaatggagctgcatttgcaggaggcactagtctgatacagaagatttgggatgatgaaattgttgcagacttttacgtagctgttccagaaataatgcctgaacttaatcgattaaggaagaaactgaataaaaaatatccaaagctttctcgaaattccattggccgtgacatccccaaaatgcttgaattatttaaaaatggacatgaaattaaggtagatgaagaaagggagaactttctccagaccaaaatagcaacattggatatgtcaagtgaccagatagctgccaatctgcaagcagttattaatgaagtttgtaggcacagaccgctgaatttgggtccctttgtggtacgtgctttccttcgtagttcaacaagtgaaggtttattactgaagattgatccattgttgcctaaagaagtaaaaaatgaagaaagtgaaaaagaagatgcctaaatgtggtgaattgtgaaattactttcagtggtttaagaagcaatggagaaaatgataatacagcataatttttacatttgatgtcttgttattgatcatacttgaaagtgaactttaacattgaaaaatcgtacagtcatttcaagaataagaaaataaaattttctctttgtctgaaaaaaaaaaaaaaaaaaaaaaaaaaaa

SEQ ID NO: 47 - DNA, 2383 bp, Homo Sapiens
gcaggcagaggagcacttagcagcttattcagtgtccgattctgattccggcaaggatccaagcatggaatgctgccgtcgggcaactcctggcacactgctcctctttctggctttcctgctcctgagttccaggaccgcacgctccgaggaggaccgggacggcctatgggatgcctggggcccatggagtgaatgctcacgcacctgcgggggtggggcctcctactctctgaggcgctgcctgagcagcaagagctgtgaaggaagaaatatccgatacagaacatgcagtaatgtggactgcccaccagaagcaggtgatttccgagctcagcaatgctcagctcataatgatgtcaagcaccatggccagttttatgaatggcttcctgtgtctaatgaccctgacaacccatgttcactcaagtgccaagccaaaggaacaaccctggttgttgaactagcacctaaggtcttagatggtacgcgttgctatacagaatctttggatatgtgcatcagtggtttatgccaaattgttggctgcgatcaccagctgggaagcaccgtcaaggaagataactgtggggtctgcaacggagatgggtccacctgccggctggtccgagggcagtataaatcccagctctccgcaaccaaatcggatgatactgtggttgcaattccctatggaagtagacatattcgccttgtcttaaaaggtcctgatcacttatatctggaaaccaaaaccctccaggggactaaaggtgaaaacagtctcaactccacaggaactttccttgtggacaattctagtgtggacttccagaaatttccagacaaagagatactgagaatggctggaccactcacagcagatttcattgtcaagattcgtaactcgggctccgctgacagtacagtccagttcatcttctatcaacccatcatccaccgatggagggagacggatttctttccttgctcagcaacctgtggaggaggttatcagctgacatcggctgagtgctacgatctgaggagcaaccgtgtggttgctgaccaatactgtcactattacccagagaacatcaaacccaaacccaagcttcaggagtgcaacttggatccttgtccagccaggtgggaggccaccccatggaccgcgtgctcctcctcgtgtggggggggcatccagagccgggcagtttcctgtgtggaggaggacatccaggggcatgtcacttcagtggaagagtggaaatgcatgtacacccctaagatgcccatcgcgcagccctgcaacatttttgactgccctaaatggctggcacaggagtggtctccggtaactgtgccttctttctttgttcattaggagagtaagtccactcttccctctcatcatcatggccccaccgggtaccctgagcagctccacactcttcttgaggtgtctagaagcctaccagcttagctcctggagtaggaatgccccaaatccagcatgaccaaaagtaaatgatgtttttttaaagtgtctttcttcaagtttcttcaagaagcctctattgttccccagataatgttccctcaaatagcacagggaagcaactgcctttcaagggtaattgaggctgaatgaatgatcccgaatctgtaaaagctgctttgatgatagagctcagtagaccagaagtttgatttcattttgtatgtattatgctttgtatccgaaagggtctaagtggattaatattaaaactatgtatattaatcattggagaagggggaagaggaaatgaaaatagcacaaaaattaaaattggaacgaagtaagataattaaaacaaaaaacttatagatgttaggaaacctgctgtaattaaacataaaatgtcattcagggtttcctgactgctaatgcagaaaggaaaatcgtaaaggaaacagaaagatgaaataagccattgtgccctccgcctcagaaatgacaaaagactcttcactgagccctgtggcttcatggcagcagatcagagctgtgacattttctacatctagacatgctaccagacatggggaaccattagaggtgcaatctacattgggcatctggtcattcaatctgtttttttaaatgttatttttgcctttcaatgtaatcaattggattaacaatgctgcaatataatttagctataatcgtagtttaaattttttgatatccatgtaggggtatttcccatatttttggaagtagcggtcattagcaaagtaactaagtaaaatacagtgctggtagtcaaaattaaaaaaaaaaaaaaaaaaaaaaaaaaaaaaaaaaaaaaaaaaaaaaaaaaaaaaaaaaaaaaaa

SEQ ID NO: 48 - DNA, 2964 bp, Homo Sapiens
gagcacagcatggcggtcaaggtgcagacaactaagcgaggggatcctcatgagttaagaaacatatttctacagtatgccagtactgaggttgatggagagcgttatatgaccccagaagactttgttcagcgctatcttggactgtataatgatccaaatagtaacccaaagatcgtgcagctcttggcaggagtagctgatcaaaccaaggatgggttgatctcctatcaagagtttttggcatttgaatctgttttatgtgctccagattccatgttcatagtggctttccagttgtttgacaagagtggaaatggagaggtgacatttgaaaatgtcaaagaaatttttggacagactattattcatcatcatatcccttttaactgggattgtgaatttatccgactgcattttgggcataaccggaagaagcatcttaactacacagaattcacgcagtttctccaggagctgcaattggaacatgcaagacaagcctttgcactcaaagacaaaagcaaaagtggcatgatttctggtctggatttcagtgacatcatggttaccattagatctcacatgcttactccttttgtggaggagaacttagtttcagcagctggaggaagtatctcacaccaggttagcttctcctacttcaatgcatttaactcgttactgaataacatggagcttgttcgtaagatatatagcactctagctggcacaaggaaagatgttgaagtcacaaaggaggaatttgcccagagtgccatacgctatggacaagtcacaccactagaaattgatattctatatcagcttgcagacttatataatgcttcagggcgcttgactttggcagatattgagagaatagccccattggctgagggggccttaccttacaacctggcagaacttcagagacagcagtctcctgggttaggcaggcctatctggctccagattgccgagtctgcttacagattcactctgggctcagttgctggagctgtgggagccactgcagtgtatcctatagatctggtgaagacccgaatgcaaaaccagcgtggctctggctctgttgttggggagctaatgtacaaaaacagctttgactgttttaagaaagtcttgcgttatgagggcttctttggactctacaggggtctgataccacaacttataggggttgctccagaaaaggccattaaactgactgttaatgattttgttcgggacaaatttaccagaagagatggctctgttccacttccagcagaagttcttgctggaggctgtgctggaggctctcaggtcatttttaccaacccattggagatagtgaagattcgtctgcaagtagctggagagatcaccacgggacccagagtcagcgccctgaatgtgctccgggacttgggaatttttggtctgtataagggtgccaaagcgtgtttcctccgagacattcccttctctgcaatctattttcctgtttatgctcattgcaaactacttctggctgatgaaaatggacacgtgggaggtttaaatcttcttgcagctggagccatggcaggtgtcccagctgcatctctggtgacccctgctgatgtcatcaagacaagactgcaggtggctgcccgcgctggccagacgacatacagtggtgtcatcgactgtttcaggaagattctccgggaagaagggccctcagcattttggaaagggactgcagctcgagtgtttcgatcctctccccagtttggtgttaccttggtcacttatgaacttctccagcggtggttttacattgattttggaggcctcaaacccgctggttcagaaccaacacctaagtcacgcattgcagaccttcctcctgccaaccctgatcacatcggtggatacagactcgccacagccacgtttgcaggcatcgaaaacaaatttggcctttatctcccgaaatttaagtctcctagtgttgctgtggttcagccaaaggcagcagtggcagccactcagtgatgagacaactgttgagtgtggcaaaatggcgccttgaagaaagaggcctaggagagcagccctgtaatgtatccagtcagctgcatggtactgactgagctgaggagtcaaactcttctttctgtatgacatatacatatacttgtttataaaataatcatttgcccagggaaaaaaccacaacgctgtttcaagctttagtcttatgtgttgaaatgtttttgtaagccttggcatgaattagtgttctagactctgctttgcacagcttgcacttacagtgattgtacatattgtacatctttgtacagagacatcttggcacctcatcccaacaaatcacatttgtagaaatgtaatgcggttctgagtggcttgaaatgtacagaatgttttgaaagtgttttattaagaatcacacaaaaataaatgtattaaaattaaattcattctcttattggtgacttatggaaataaagcatcaatattggatgtatttaattcctagtttgttttccattctggaataaaaaggtatttgctgataaaaggcataacgagacatagtgctgctaccactgaataagtgatactttggaaagatgcatgccagtggatgccagaggaccaggctaatgacttgtgtgtgctgatgtgtttccatttgtatttaatgtgtgtagaccctcctctgttcatcaatcaaaaagcatttcctaggcagctcctcgcctgtcagtgtgcatatggaaacagggacatctccatcattactggcttagttttgctttcctttgacacagtaaggcaaaggccaagctttcaaaagagtaaaggatactttcacaatttcccttcatatggatatgattccagtcaaaaataaaatgcacaccaaaatgtaaaaaaaaaaaaaaa

SEQ ID NO: 49 - DNA, 2306 bp, Homo Sapiens
gagcttgagaattgctcctgccctgggaagaggctcagcacagaaagaggaaggacagcacagctgacagccgtgctcagagagtttctggatcctaggcttatctccacagaggagaacacacaagcagcagagaccatgggaaccctctcagcccctccctgcacacagcgcatcaaatggaaggggctcctgctcacagcatcacttttaaacttctggaacctgcccaccactgcccaagtcacgattgaagccgagccaaccaaagtttccgaggggaaggatgttcttctacttgtccacaatttgccccagaatcttaccggctacatctggtacaaagggcaaatgagggacctctaccattacattacatcatatgtagtagacggtgaaataattatatatgggcctgcatatagtggacgagaaacagcatattccaatgcatccctgctgatccagaatgtcacccgggaggacgcaggatcctacaccttacacatcataaagggagatgatgggactagaggagtaactggacgtttcaccttcaccttacacctggagactcctaagccctccatctccagcagcaacttaaatcccagggagaccatggaggctgtgagcttaacctgtgaccctgagactccagacgcaagctacctgtggtggatgaatggtcagagcctccctatgactcacagcttgaagctgtccgaaaccaacaggaccctctttctattgggtgtcacaaagtatactgcaggaccctatgaatgtgaaatacggaacccagtgagtgccagccgcagtgacccagtcaccctgaatctcctcccgaagctgcccaagccctacatcaccatcaacaacttaaaccccagggagaataaggatgtcttaaacttcacctgtgaacctaagagtgagaactacacctacatttggtggctaaatggtcagagcctcccggtcagtcccagggtaaagcgacccattgaaaacaggatcctcattctacccagtgtcacgagaaatgaaacaggaccctatcaatgtgaaatacgggaccgatatggtggcatccgcagtgacccagtcaccctgaatgtcctctatggtccagacctccccagaatttacccttcattcacctattaccgttcaggagaagtcctctacttgtcctgttctgcggactctaacccaccggcacagtattcttggacaattaatgaaaagtttcagctaccaggacaaaagctctttatccgccatattactacaaagcatagcgggctctatgtttgctctgttcgtaactcagccactggcaaggaaagctccaaatccatgacagtcgaagtctctggtaagtggatcccagcatcgttggcaatagggttttaggtggagtctatctggcattcagagaagagtcaggaaaacaattgtattcccagcctgtgtcccatgggcacaagcaaatcccaaattctcctcctgaaccctccaaatttgtctaagaacttcgaaaactttaacaaacaggctgatatcttcataatattcccagcctagaccaagcaggaagaacattgatttcattgaaataattgataataatgaagataatgtttttatgatttttatttgaaaatttgctgattctttaaatggtttgttttctacattgatggaatttttctcttttaatctatctacagcttatagcagttcaataaactatacttctgggaaccgtaattgaaacatttacttttgctttctacctgactgccccagaattgggcaactattcatgagaattgatatgtttatggtaatacacatatttgcacaagtacagtaacaatctgctttctttgtaacatgacacatttgaaatcattggttatattaccaatgctttgattcggatgttatattaaaaacatagatagaatgaaccaatatgaactgcaggcaaagtctgaagtcagccttggtttggcttcctattctcaagaggtttgtgaagatttaatctcagattccttataaaaacttagagaaaagaaaattttagaagacagcctacatggtccattgctactcttgctgcacttatgtaaacaatcagaccacatttgaagaaactccacctattttgcaaacaaacttattctactgaaattatcattggtaaaagtagagatgcccatagagggaaaaattatgtggaaaataaaaactgtagtatacctaaaaaaaaaaaaaaaaaaaaaaaaaaaaaa

SEQ ID NO: 50 - DNA, 3857 bp, Homo Sapiens
ccgcggtcggcggcagcgctctcctaagctctcgcggctgcgcttcggtcccggacccgggccacccacggggtagtgggtgctcctcggccccggacattgcaagccccagaaggcaagactaactcggtgttgctcctcccggcgctgacttcgaggcccggctatggacggcgagagcgaggtggatttttctagcaacagcataacccctttgtggcggaggcggtcgattcctcagccccaccagcttctgggccggagcaagccgaggccccagtcctaccagagccccaacgggttactaattacggatttcccggtggaggacggagggacgctctccgcagcgcagattcccgcccaggtgcccaccgcctcggacagcaggacggtacataggagccccctgcttctgggcgcccagcggagagcggtggccaatggtgggacggcatccccggagtacagggctgcctctcctcgacttcgacggcccaagtcacccaagctccccaaagcggtgcctggcggctccccgaaatccccagcaaatggcgcggtgaccttgcctgcgccgccgccgccgccggttctgcgccccccgcggactcctaacgcgcccgccccctgcacccccgaggaggaccttactgggttgactgccagcccggtgccttcgcccactgcaaatggccttgccgctaataacgactctcctgggtcaggttcgcagtccggccggaaggcaaaggaccccgaacgggggctctttcctgggccccagaaaagttcttcggaacaaaaactccccctccaaaggctgccctcccaggagaacgagctcctcgagaatccttccgtggttttgagtacaaacagccccgccgccctcaaagtggggaagcagcagatcattccgaagagtctggcctcggaaattaaaataagtaaatccaacaatcaaaatgtggagccccacaagagactcctcaaggtgcgcagcatggtggagggcctaggaggacccctgggtcacgcaggggaggagagtgaggtcgataacgacgtggatagcccagggtctctgcggagaggcttgcggtccacgtcttatcgcagggcagtggtcagtggctttgattttgacagtcctaccagctcgaagaagaagaacagaatgtcccagcctgttctgaaagtggtgatggaagacaaggagaagttttccagtctgggaaggataaagaaaaaaatgctgaaaggacaaggaacatttgatggggaagaaaatgctgtcctgtatcaaaactacaaggaaaaggcccttgacattgattctgatgaagagtcagagcccaaagaacagaagtcagatgaaaaaattgtgattcaccataagccattgagatccacatggagccaactctctgcggtgaaaagaaagggattatctcagacagtaagccaggaggaaagaaagagacaagaggctatctttgaagtcatatcctctgaacattcatatttactcagcttggagatcttgatacgaatgtttaaaaattctaaagaactgagtgatacaatgactaaaaccgagaggcaccatcttttctccaatattacagatgtctgtgaggcaagcaaaaagttctttatagagttggaagcaagacatcagaataatatcttcatagatgacataagtgacattgtggaaaaacacacagcatccacatttgacccatatgtgaaatactgcacaaatgaagtctaccaacaacgaacactacaaaaattgttagctaccaatccttcctttaaggaagtattgtcaaggattgagtcccatgaagactgtaggaacttacccatgatctcttttctcattctccccatgcagagggtgacccgccttcccctgctgatggatactatctgtcaaaaaacacctaaggactctccgaagtatgaagtctgcaaaagagccttgaaggaagttagcaagttggttcgactatgcaatgagggcgcccggaagatggaaaggactgagatgatgtacacaattaactcccagctggaatttaaaattaagccttttcctttagtctcctcttcccggtggttggtaaaaagaggtgaattgacagcctatgttgaagacactgtgcttttctcaagaaggacatccaaacagcaagtctacttctttctctttaacgatgtgctcattatcaccaagaagaagagtgaagaaagttacaacgtcaatgattattccttaagagatcagctattggtggaatcttgtgacaatgaagagcttaattcttctccagggaagaacagctccacaatgctctattcaagacagagctctgccagtcacctctttactctgacagtccttagtaaccacgcgaatgagaaagtggagatgctactaggagctgagacgcagagcgagcgagcccgctggataactgccctgggacacagcagagggaagccgcctgcagaccgaacctcactgacccaggtggaaatcgttaggtcatttactgctaagcagccagatgaactctccctgcaggtggctgacgtcgtcctcatctatcaacgtgtcagcgatggctggtatgagggggaacgactacgagatggagaaagaggctggtttcctatggaatgtgccaaggagataacatgtcaagctacaattgataagaatgtggagagaatgggacgcttgctaggactggagaccaacgtgtagtctctcagatggtcttttgttactgcaagatttgcacgacacttaccgggctggttggttctgggctagttttattgttaattttgtcacagcctatttaattaaaagaacgaaaacacttgcctttaagcttgccaggttgttccgctctctcatgagaagagcttggatacagtgagtttgcacagctcagtttttacctaaccacacacttgcagacctcctgaggtacacagagtagctgagcagttcacttcagggatcaggtcatctctgctcctcctagtttcaccatgttctggcaataaaaaacacatattatatcctggttttctctatccttgcattactaaggtgactgtctctctttatacatccttgtatggttctcccagtattagcaagattgtatatctgtaaagaatgtccagttttgtaaatatttccctgcctttttttttctttttttacatctgattttaatgcttcgttaacttcaaaaggaactggtagagttcagaaggtgagctgttgtttttctaaacctcttcccaggaaggggacattgacacttgaatttttgtcacctttttcctcattagaaggaaagtagaaagccttactgtaggatttttaaaaaaaaatccatctcaccccatattggtcttaaataagtatagactaattaacctaagctacctttaacaacgtagaatttagatgggttcatatatgtgagaaaaacctgaatataggacaggggtcctacttttttccccacctctgtcgcccaggctagagtatagtggtgtgatcttggcccactgcaacctctgcttcctaggttcaagtgattctcctgcctcagcctcccaagtagctgggattgtaagagtatgccaccacgcccagctactttttgtatttttagtagagacagggtttcatcatgttggccaggatggtctcttaactcctgccctcaagtgatccaccagagaggagatcctcggcctccccaagtgctgggattataggcatgagccaccgtgcccagcctactttctaattaatt

SEQ ID NO: 51 - DNA, 1349 bp, Homo Sapiens
agaaggcctcgcacaaaacactgtacaaacccgaaaggaagtctgagagacgaaccgccttcctccctgaagcttctagaactggagcagaaagaaggtgtggcccagggccagccccgcctcctccccgggcggaagctgtgtcagttgccggaagtcggcgtgaggtggggcttatgcggcggcgtggtgaaatagatatggcgaccgagggggatgtggagctggagttggagactgagaccagtggaccagagcggcctccggagaagccacggaaacatgacagcggtgcggcggacttggagcgggtcaccgactatgcagaggagaaggagatccagagttccaatctggagacggccatgtctgtgattggagacagaaggtcccgggagcagaaagccaaacaggagcgggagaaagaactggcaaaagtcactatcaagaaggaagatctggagctaataatgactgagatggagatatctcgagcagcagcagaacgcagtttgcgggaacacatgggcaacgtggtagaggcgcttattgccctaaccaactgatgcgtgctttctcaaatatacctactggattaatttatggcaataaaatttttttttgtctttttcagttttatcatcttgggtcaagtagagtgtatactatatcctatgttgtggagaatttatatgttggagactaactgaatttaagtgacccattaaaatctagcacacctgtatgaaaaatcagtgtagaagaatacctcatgtgcagatgctaggtggcaggccagtctcattcatctgactagctctcaacagtattcaaggtacatctggagtctcagcagagttactgtactcaaatggcatgtgtctccaagacagcttatgaatatctaaaaggccagctacctgcctaggagccactatatatatagatagatgtaggttatgaacccagttcataggccaccttgagttagaattttggtacctacaacatgcttgattttgagtgattaaaaaaaaataatttggctgggtgctgtggctcacgcctctaatcccagcactttgggaggtcgaggcaggtagatcacgaggtcaggaattcaagaccagcctggccaacatgtgaaaccccgtctccactgaaaatagaaaaattagctgggcatggtggtgggcgcctataatcccagctattctggaggctgaggcaggaatcgcttgaaattggaaagcagaggttgcagtgagctgagatcacactactgtactactgtactccagcctgggggaaagagtgaaactccatctcaaaaaaaaaaaaaaaaaaaa

SEQ ID NO: 52 - DNA, 2989 bp, Homo Sapiens
attcaagggaggcaggcgctttggaagtttgtaaacaccaactttctgagtaagggaggagcactttttttccaaaaaggaaagaacgtctctactgggtttttttcctcctgatattcagcattagagtagaaaagaaactattgtttggccacattagccgtggttagcaggtgctgcagcctttgccactgttattatttttaaagggcagaaatgcctgaaggtgaagactttggaccaggcaaaagctgggaagttatcaattccaaaccagatgaaagacccaggctcagccactgtattgcagaatcatggatgaatttcagcatatttcttcaagaaatgtctctttttaaacagcagagccctggcaagttttgtctcctggtctgtagtgtgtgcacattttttacgatcttgggaagttacattcctggggttatactcagctatctactgttactgtgtgcatttttgtgtccattgtttaaatgtaatgatattggacaaaaaatttacagcaaaattaagtcagttctgctgaaactggattttggaattggagaatatattaatcagaagaaacgtgagagatctgaagcagacaaagaaaaaagtcacaaagatgacagtgaattagacttttcagctctttgtcctaagattagcctcacggttgctgccaaagagttatctgtgtctgacacagacgtctcagaggtatcctggactgataatgggaccttcaacctttcagaaggatacactccacagacagacacttctgatgatcttgaccgacccagtgaggaagttttctctagagatctttcagattttccatctctagaaaatggcatgggaacaaatgatgaagatgaattaagccttggtttgcccactgagctcaagagaaagaaggaacagttggacagtggtcacagaccaagcaaagagacgcaatcagcagctggtctcacccttcctctgaacagtgaccaaacctttcacctgatgagcaacctggctggggatgttatcacagctgcagtgactgcagctatcaaagaccagttagagggtgtgcagcaagcactttctcaggctgcccccatcccagaagaggacacagacactgaagaaggtgatgactttgaactacttgaccagtcagagctggatcaaattgagagtgaattgggacttacacaagaccaggaagcagaagcacagcaaaataagaagtcttcaggtttcctttcaaatctgctgggaggccattaatctaggaatcagcttgcaacagagcacaaaaaacaccaaaaaaatttcaaacaagaaaaaaaaaaaaaaaaaggaaaagaaaaaaattgaactgtaagctttaatgattactttagatttgttttattttccctcctgcagtgaattaattggatatatatcagctgacactgatagattgatatttctgatcgttatttttgtgtcataagcatggaaatgaactttatacacaccactgtgttgtcagagataaatattaggggttgtttttaaagcaaaaagaaaaaaacaaaaaccaaactattaaaatcctcctataaatattctttttctttacagtttttcaagcatgcaaaacagtttattgtaacttactgaaaaatattaacaattaattgtgaatacatgctgttaccagcttccttattcctaatacctggaaaatttttttttcaacggatagattttgatgtaaaaaagaccgaaattatcaaggtatcttagttgaaggacttgggaaatactatcaaaattaatttcttaggaaaaaatttaaaagtatatttaagtactctggatagactgaaacgtttccatgttatttctgcagttgtagacttaggcttatttgtaaagaagcatgctccattgactgccatctctagtcttgcagtgggtggtattaacccatagaaagcaagcagttgtgtatcacatagacaatggttatgatgtaaacagattcagttgttttgttgttcattcgtcatatgtttgtgatagggatgttgggagcacagctctattctgcctgctcagacttaagttagacccttatcttttatattatgtcatgaaaaaagtctcctaaaattgtgaaactagttcttgatgagtgatgtgatcatcagcaataaagatataataactctgttttcttagcctgtatagaggagaggaacttgcttggctttaaaatatatttatttgccatttaagtataaatatggaatctgtttcttattgggaagatagaatatatatattttcctttaaactttttaaggtcacttttaaataaccaaatttgatttatggtttttaacaaaggactaaagagctgaaaccaacctagttttgtttttgtgatataaactttaagtgtcgagggaccatgccagcaactaccaaaaatctcttaaatcttcaggtacagctggcattttggcagatgcatagagacatctgagaccctcagaaaggaaggataatccaagaatataggaaatctgtgttctcttcctttcattttatcccttatatttctaaagactaattataagtaatctgacattttaatgtagctactcttatttattttttctttctgaggtattaaaatatctggactgagttttgccaaatgttaaagggagaagagttactgaagactttgaacacttgctttttgtgattgcttatgtcattagtgcctcatgactgtgtttgatgtcctttattgatacaaagtgagcctgtgccttcattatcttgcccattttaatacaaatggaaacctggtgtttgaaaatctctgaactgtgtgggttttggaggaatatacctgaattttattcaataacagtttctggacaggaagaaaaatacagttacatatttataaaaaaaaaaaaaaaaa

SEQ ID NO: 53 - DNA, 3012 bp, Homo Sapiens
cgactgactagccgggcgataacggcagagagcatagagcgcaggaacaagcgcaacgtccaagagggaagggccagcacgtcgggggcctctctggccctacccaggccgtgttctcgatagctttccggaagaaagggatctgggagcgagatgcgtgtagctagcacgatgcgtcgcgcggtgacgctctggcccgacgccgacggcctctcagtggctcccggaggacccggcgggcccagtgttggagagctgaaggtcaggccaggacagtgagacctgactccttgctcctaccagcctactatggcttaagacccagggccagggtcccgttgatgtaacagagcagaggaccagcagatgaatggacaccttgaagcagaggagcagcaggaccagaggccagaccaggagctgaccgggagctggggccacgggcctaggagcaccctggtcagggctaaggccatggccccgcccccaccgccactggctgccagcaccccgctcctccatggcgagtttggctcctacccagcccgaggcccacgctttgccctcacccttacatcgcaggccctgcacatacagcggctgcgccccaaacctgaagccaggccccggggtggcctggtcccgttggccgaggtctcaggctgctgcaccctgcgaagccgcagcccctcagactcagcggcctacttctgcatctacacctaccctcggggccggcgcggggcccggcgcagagccactcgcaccttccgggcagatggggccgccacctacgaagagaaccgtgccgaggcccagcgctgggccactgccctcacctgtctgctccgaggactgccactgcccggggatggggagatcacccctgacctgctacctcggccgccccggttgcttctattggtcaatccctttgggggtcggggcctggcctggcagtggtgtaagaaccacgtgcttcccatgatctctgaagctgggctgtccttcaacctcatccagacagaacgacagaaccacgcccgggagctggtccaggggctgagcctgagtgagtgggatggcatcgtcacggtctcgggagacgggctgctccatgaggtgctgaacgggctcctagatcgccctgactgggaggaagctgtgaagatgcctgtgggcatcctcccctgcggctcgggcaacgcgctggccggagcagtgaaccagcacgggggatttgagccagccctgggcctcgacctgttgctcaactgctcactgttgctgtgccggggtggtggccacccactggacctgctctccgtgacgctggcctcgggctcccgctgtttctccttcctgtctgtggcctggggcttcgtgtcagatgtggatatccagagcgagcgcttcagggccttgggcagtgcccgcttcacactgggcacggtgctgggcctcgccacactgcacacctaccgcggacgcctctcctacctccccgccactgtggaacctgcctcgcccacccctgcccatagcctgcctcgtgccaagtcggagctgaccctaaccccagacccagccccgcccatggcccactcacccctgcatcgttctgtgtctgacctgcctcttcccctgccccagcctgccctggcctctcctggctcgccagaacccctgcccatcctgtccctcaacggtgggggcccagagctggctggggactggggtggggctggggatgctccgctgtccccggacccactgctgtcttcacctcctggctctcccaaggcagctctacactcacccgtctccgaaggggcccccgtaattcccccatcctctgggctcccacttcccacccctgatgcccgggtaggggcctccacctgcggcccgcccgaccacctgctgcctccgctgggcaccccgctgcccccagactgggtgacgctggagggggactttgtgctcatgttggccatctcgcccagccacctaggcgctgacctggtggcagctccgcatgcgcgcttcgacgacggcctggtgcacctgtgctgggtgcgtagcggcatctcgcgggctgcgctgctgcgccttttcttggccatggagcgtggtagccacttcagcctgggctgtccgcagctgggctacgccgcggcccgtgccttccgcctagagccgctcacaccacgcggcgtgctcacagtggacggggagcaggtggagtatgggccgctacaggcacagatgcaccctggcatcggtacactgctcactgggcctcctggctgcccggggcgggagccctgaaactaaacaagcttggtacccgccgggggcggggcctacattccaatggggcggagcctgagctagggggtgtggcctggctgctagagttgtggtggcaggggccctggccccgtctcaggattgcgctcgctttcatgggaccagacgtgatgctggaaggtgggcgtcgtcacggttaaagagaaatgggctcgtcccgagggtagtgcctgatcaatgagggcggggcctggcgtctgatctggggccgcccttacggggcagggctcagtcctgacgcttgccacctgctcctacccggccaggatggctgagggcggagtctattttacgcgtcgcccaatgacaggacctggaatgtactggctggggtaggcctcagtgagtcggccggtcagggcccgcagcctcgccccatccactccggtgcctccatttagctggccaatcagcccaggaggggcaggttccccggggccggcgctaggatttgcactaatgttcctctccccgcgggtgggggcggggaaattcatatcccctgttcgtctcatgcgcgtcctccgtccccaatctaaaaagcaattgaaaaggtctatgcaataaaggcagtcgcttcattcctctcaaaaaaaaaaaaaaaaaaaaaaaaaaaaaaaaaaaaaaaaaaaaaaaaaa

SEQ ID NO: 54 - DNA, 1910 bp, Homo Sapiens
gggaagtagaagacagcggcgttgccatggcggcgtctctggggcaggtgttggctctggtgctggtggccgctctgtggggtggcacgcagccgctgctgaagcgggcctccgccggcctgcagcgggttcatgagccgacctgggcccagcagttgctacaggagatgaagaccctcttcttgaatactgagtacctgatgccctttctcctcaaccagtgtggatcccttctctattacctcaccttggcatcgacagatctgaccctggctgtgcccatctgtaactctctggctatcatcttcacactgattgttgggaaggcccttggagaagatattggtggaaaacgagcagttgctggcatggtgctcaccgtgataggaatttcactctgcatcacaagctcagttccatggactgcagaactccagctgcatggaaagggccagctgcagactttgagccagaaatgcaaacgggaggcctctgggactcagtcagagcgctttggctgaatgaggggtggaaccgagggaagaaggtagagagctgtgagccccagccccacctgactccagcacacctggcgagtagtagctgtcaataaatctatggtaaacagacaagaggaggtggaaggccatacagaatggagccgtgagtatggccagcctccagctctcagccaggaggtccccaaccccaaggaaggaagaaactggaaattaggaactgcttcctcatttaacaaggtaggaagttaggagatcatttactttcaatcacaagggaggagaactgttcctggggcccaaggctgccagtttccagctcagagctcctcccaccccaacatactgtttcctgatccaacagcttacctgatccaagggctcctctgtctgagtgtcttcatcatctgctacttccagggcccccgctgtctccttccttcggtggggagctccatatactcctataactcctaaagaggggaggcagcactgggtgatgcccaggctgaagagccctcagcattcctgccctggaccttcatgctagcccctttccctcccctgaacctggttctgcattccccaccacctcccaggatggcaaggaagtgagaggtgggcctttggtcccacccccatcccctctatatcccacccctgaagtcttatcgctttaagcactgccctttccaggtgcttcttttcatgtgatgaggccctgtgaagaagggacaggatatacagacgggggcagctggagacagttatgatgagtgccggctttgtgtctgagcattctgctcccatggacatccccaacaacagcagggaccaacctatgtcactgtcaaagggcagctgagaagggcctgagccccagggacccctcacctgatgggaatgagagtgtggggagcttgcttcttggctgaatggtctgctggggtctggcatagaaagcagatggcttaattcggtctggttcctttggagagggctgggttacctgggccctgtggccttgggcctagagaagggacactgggcttggaccctgattgctggccattcttacctttcctactccccagttcaggcttcagagagcccctgacgcctgcaggaacatggcagaggagacaccgtctgtcttcacaaagtacgtcctccctccttgctgcctcttcccaccagcctgacttatccagggacagagcagtagatgcctggcactcctcgatgcccagtgaaaccagactgtgcttccccacccccaccaccatgccccatgctcactggctcatttcttgggagggcttagagctggataatataagttcccttgggaaaaaaaaaaaaaaaaaaaaaaaaaaaaaaaaaaaaaaaaaa

SEQ ID NO: 55 - DNA, 2090 bp, Homo Sapiens
gccagcagctgcagctcggcctctgctgcctgccggtgctcttcgtggctctgggcatggcctcggaccccatcttcacgctggcgcccccgctgcattgccactacggggccttcccccctaatgcctctggctgggagcagcctcccaatgccagcggcgtcagcgtcgccagcgctgccctagcagccagcgccgccagccgtgtcgccaccagtaccgacccctcgtgcagcggcttcgccccgccggacttcaaccattgcctcaaggattgggactataatggccttcctgtgctcaccaccaacgccatcggccagtgggatctggtgtgtgacctgggctggcaggtgatcctggagcagatcctcttcatcttgggctttgcctccggctacctgttcctgggttaccccgcagacagatttggccgtcgcgggattgtgctgctgaccttggggctggtgggcccctgtggagtaggaggggctgctgcaggctcctccacaggcgtcatggccctccgattcctcttgggctttctgcttgccggtgttgacctgggtgtctacctgatgcgcctggagctgtgcgacccaacccagaggcttcgggtggccctggcaggggagttggtgggggtgggagggcacttcctgttcctgggcctggcccttgtctctaaggattggcgattcctacagcgaatgatcaccgctccctgcatcctcttcctgttttatggctggcctggtttgttcctggagtccgcacggtggctgatagtgaagcggcagattgaggaggctcagtctgtgctgaggatcctggctgagcgaaaccggccccatgggcagatgctgggggaggaggcccaggaggccctgcaggacctggagaatacctgccctctccctgcaacatcctccttttcctttgcttccctcctcaactaccgcaacatctggaaaaatctgcttatcctgggcttcaccaacttcattgcccatgccattcgccactgctaccagcctgtgggaggaggagggagcccatcggacttctacctgtgctctctgctggccagcggcaccgcagccctggcctgtgtcttcctgggggtcaccgtggaccgatttggccgccggggcatccttcttctctccatgacccttaccggcattgcttccctggtcctgctgggcctgtgggattgtgagcatcctatcttccccacagtgtgggctcaacaagggaaccccaacagagatctgaacgaggctgccatcaccactttctctgtccttgggctcttctcctcccaagctgccgccatcctcagcaccctccttgctgctgaggtcatccccaccactgtccggggccgtggcctgggcctgatcatggctctaggggcgcttggaggactgagcggcccggcccagcgcctccacatgggccatggagccttcctgcagcacgtggtgctggcggcctgcgccctcctctgcattctcagcattatgctgctgccggagaccaagcgcaagctcctgcccgaggtgctccgggacggggagctgtgtcgccggccttccctgctgcggcagccaccccctacccgctgtgaccacgtcccgctgcttgccacccccaaccctgccctctgagcggcctctgagtaccctggcgggaggctggcccacacagaaaggtggcaagaagatcgggaagactgagtagggaaggcagggctgcccagaagtctcagaggcacctcacgccagccatcgcggagagctcagagggccgtccccaccctgcctcctccctgctgctttgcattcacttccttggccagagtcaggggacagggagagagctccacactgtaaccactgggtctgggctccatcctgcgcccaaagacatccacccagacctcattatttcttgctctatcattctgtttcaataaagacatttggaataaacgagcaaaaaaaaaaaaaaaaaaaaaaaaaaaaaaaaaaaaaaaaaaaaaaaaaaaaaaaaaaaaaaaaaaaaaaaaaaaaaaaaaaaaaaaa

SEQ ID NO: 56 - DNA, 2875 bp, Homo Sapiens
agaactagtccgctcggcgcccagagcctcgcattacttcccctagctccgccaagcctcgctgcatacgcgcccgcgcgcagtccgccgtcgcgcccctatgacgtcacccacgcgccaccgcttccgggctggggactgggggcggggccgcgcggagggcaagccgggggcggggccggggccagagcagatctccgggcctccgcggccatagctgactgtgccgtcccttcccctcacccgctccacgccctcctgggccgagtggagttgggtggtgtcgggagcctctccctgaggggcaccgcggcttcaggagctgggcctccagtgcggcgcgatgtcaggcgcggtgacagctctgtgagtccgaggccgcggccgtggcgctgggcggctgcggggcctgaccggtccgctcatggtgccgccacgacgccatcgcggggcaggaaggccaggggtgctgagttcttcacctccttttagactgagatctgccaagttttccggcattgctcttgaggatctcagaagggctcttaagacaagactgcaaatggtgtgtgtatttgtcatgaaccgaatgaattcccagaacagtggtttcactcagcgcaggcgaatggctcttgggattgttattcttctgcttgttgatgtgatatgggttgcttcctctgaacttacttcgtatgtttttacccagtacaacaaaccattcttcagcacctttgcaaaaacatctatgtttgttttgtaccttttgggctttattatttggaagccatggagacaacagtgtacaagaggacttcgcggaaagcatgctgctttttttgcagatgctgaaggttactttgctgcttgcacaacagatacaactatgaatagttctttgagtgaacctctgtatgtgcctgtgaaattccatgatcttccaagtgaaaaacctgagagcacaaacattgatactgaaaaaacccccaaaaagtctcgtgtgaggttcagtaatatcatggagattcgacagcttccgtcaagtcatgcattggaagcaaagttgtctcgcatgtcatatcctgtgaaagaacaagaatccatactgaaaactgtggggaaacttactgcaactcaagtagcgaaaattagcttttttttttgctttgtgtggtttttggcaaatttgtcatatcaagaagcactttcagacacacaagttgctatagttaatattttatcttcaacttccggactttttaccttaatccttgctgcagtatttccaagtaacagtggagatagatttaccctttctaaactattagctgtaattttaagcattggaggcgttgtactggtaaacctggcagggtctgaaaaacctgctggaagagacacagtaggttccatttggtctcttgctggagccatgctctatgctgtctatattgttatgattaagagaaaagtagatagagaagacaagttggatattccaatgttctttggttttgtaggtttgtttaatctgctgctcttatggccaggtttctttttacttcattatactggatttgaggacttcgagtttcccaataaagtagtattaatgtgcattatcattaatggccttattggaacagtactctcagagttcctgtggttgtggggctgctttcttacctcatcattgataggcacacttgcactaagccttacaatacctctgtccataatagctgacatgtgtatgcaaaaggtgcagttttcttggttattttttgcaggagctatccctgtatttttttcattttttattgtaactctcctatgccattataataattgggatcctgtgatggtgggaatcagaagaatatttgcttttatatgcagaaaacatcgaattcagagagttccagaagacagcgaacagtgtgagagtctcatttctatgcacagtgtttctcaggaggatggagctagttagctgtctgttgtctgtagcccagcttgataatggaactatacagcgaagagacaatctctggcaagtttttgtagaaaaaatgtttcagtgcctagtctgaaaaataacagtttgagttctttgaaactctaaaatatatttttctcatacctgttttcttcattttcataatgaagcactttgctatgtagctgtgtacatatcactacagttataggaagtttcagtctacagtccatccaaaggaccaacctgccttacacatctcaaggaattcagctgttgaaatcatttgaactaatcaaggaataaatcctaatgttctgggactttattttcacatgttaaatgctggaatatattatgaaaatgttttcaagaaatcacttaagtgttcatagaccagtatttctgacaggtaaaatgctaaaataagctacctgtaataagtgtggattatatttttgggttttgtagaatattgcaaattaaccacacaaaaaatgtttaatttatgcaacaagcatgtttgtgcaaatttcatgggactttaaaaagaataagtatttgagaaaatatctggttcacttacactacatttactgtattattcttttatagcattaggtgccttgtattttaaatctgtgacaaaccatggcaaatttttaaaggggaagtattattataaaatgaagaaatatgtatttctaaaggctatattgctgtaaacttaattgataaagctctgtttaatttagagttttgaagaaatagtctcccttcaattaagaaattttcataatggaatgatttaaattgaagtgacaaagagtattattaaaatacaatgtttatacgtgtaaaaaaaaaaaaaaa

SEQ ID NO: 57 - DNA, 2448 bp, Homo Sapiens
cgagcgccgagcggtcgatcgccgtagctcccgcagcctgcgatctccagtctgtggctcctaccagccattgtaggccaataatccgttatggagcatgcctttaccccgttggagcccctgctttccactgggaatttgaagtactgccttgtaattcttaatcagcctttggacaactattttcgtcatctttggaacaaagctcttttaagagcctgtgccgatggaggtgccaaccgcttatatgatatcaccgaaggagagagagaaagctttttgcctgaattcatcaatggagactttgattctattaggcctgaagtcagagaatactatgctactaagggatgtgagctcatttcaactcctgatcaagaccacactgactttactaagtgccttaaaatgctccaaaagaagatagaagaaaaagacttaaaggttgatgtgatcgtgacactgggaggccttgctgggcgttttgaccagattatggcatctgtgaataccttgttccaagcgactcacatcactccttttccaattataataatccaagaggaatcgctgatctacctgctccaaccaggaaagcacaggttgcatgtagacactggaatggagggtgattggtgtggccttattcctgttggacagccttgtatgcaggttacaaccacaggcctcaagtggaacctcacaaatgatgtgcttgcttttggaacattggtcagtacttccaatacctacgacgggtctggtgttgtgactgtggaaactgaccacccactcctctggaccatggccatcaaaagctaacctgttgactggcatccataagtgtgcctctgccttatctcatttctcaacagttcattgctcaacaagaacgattcacctgggtttgcaagaatctaaacctctctaggggaagcccactgggtttaaagatgttagtgtttagataatacaggtaacattataaatgacagatctcaattttatagtagtgggaaagatacatgctaagaaagcaaataagctctattatattcggttggaacctaatgggaatcattccactatacaattcagtactgattattcttcttacattattaatcattccatttatcctagaaaattgtttttaatttgaatcagagaaaactgttgaggttcctcttggagtctagaacatccttaaatgtctaacaacaagggctacctctgagtaccttttagtattagttttctgtatatgatatatattatcttatactgaaaaaaaattcctttcagattggggtgttagaagtgcaccaggtcactctgaccttattactgtctttggtattgtcttaaataaatcaagaatcattgacctaattgttaaatttaaaaataggtagttagcaataggtggaaagagaaatgatgtgaaagataaatgatgattcgtggagccctactcacacattaacccccaaattcaaaagtaagaatgcaaaagtctagagggggtaacagtctgcatcatcatcacaacctaaatggagaaagctgtgcagaggaaacttaagcataaaaattgaattcgtttctgacataccttagactgaaaaactgttggttcatccagaagtgtattcatattaccagaaaatgagtttgtctatggggatacatgaacttcatatactaaggagcctaactccaaagcctgcgttctcatcccagtctgatattcacctaagtttccggacccttttccttagctgtaaaatggaagcggttggactgatggtgtctgaggttctttcccacactgaaattctaaatattgacacttagcagtcatagggctgataatacacacagttactgacttagcctaaacaacctggtgcatcgaaatgtattcacctttcttttgtaaagagaccatcttctatcttctttccacctttctctgttttatgaaaccaactgttgacatacaaaccatgattgaaggagaacctgtccaacatgttttatgtacacaaatccctatgttgctataagaaaagtgaaagtaactgttttcttcttggtgctatgacagtgtgagactcaggttgtctgtagagaatgaaaggagcagtggcccgcgtgattgtggcatttaaggagcagtggcccatgtgactgtggcattttcggcacttttcattactttctgcttgaccggaagttgaggcttagctatgtttccatcttcagtttctgaagactagttatatattccttactagaaatatattcataatatataaaagaaatatatctgtgattttaaaattttgctaccaaagaatgcatgttctgtgtgccctgaaaatgttaccagtgttaataaatggatacttatcgaaaaaaaaaaaaaaaaaaaaaaaaaaaaaa

SEQ ID NO: 58 - DNA, 1826 bp, Homo Sapiens
gcgaggcgtcgggatgcagcgccccgggcccttcagcaccctctacgggcgggtcttggccccgctgcccgggagggccgggggcgcggcctccggcggaggagggaacagctgggacctcccgggttcccacgtgcggctgccggggcgtgcacagtctgggacccgtggcggtgctggcaacacaagcaccagctgcggggactccaacagcatctgcccggccccctccacgatgtccaaggccgaggaggccaagaagctggcgggccgcgcggctgtggagaaccacgtgaggaataaccaagtgctgggaattggaagtggttctacaattgtccatgctgtgcagcgaatagctgaaagggtgaagcaagagaatctgaacctcgtctgtattcccacttccttccaggcccgccagctcatcctgcagtatggcttgaccctcagtgatctggatcgacacccagagatcgaccttgccatcgatggtgctgatgaagtagatgctgatctcaatctcatcaagggtggcggaggctgcctgacccaggagaagattgtggctggctatgctagtcgcttcatcgtgatcgctgatttcaggaaagattcgaagaatctcggggatcagtggcacaagggaatccccatcgaggtcatcccaatggcctatgtcccagtgagccgagctgtgagccagaagtttgggggcgtggttgaacttcgaatggctgtcaacaaggctggtcctgtggtgacagataatgggaattttatcttggactggaagtttgaccgggtacacaaatggagtgaagtgaatacagctatcaaaatgatcccaggtgtggtggacacaggcctattcatcaacatggctgagagagtctactttgggatgcaggatggctcagtgaacatgagggagaagcctttctgttgaccctgcaaggagcagagtgtgttcaccttgagtctccagcccacagccaaggtggacgtacctctccaggagcctttgccttaatgtatctctgcctggacaacttgtggtggggggtggggggaagagtgggagggggagttaaatccagtcttatgaagtattgttattaaatgtctttttaaaaagagaaatataaacatatatttttactattaaaatattcagttttttaaatgaagtagaacttgagttcatgttttatatgaaatatttaccaaaaaaaaaaaatgaggtaaactgtatttaaaacctttgacttgagtctgctggtaaagcttctgaatattgagtttgctgagaaataaaaatcaaaacttctttaagctggtaaagtgaggggcccaccagcagtgatctcctgatgccttactggaaactttgtttacttgtctgctaccctctgatttgtttttagttagtttttattgtgagcacacatagtacctagttacatcttaagatcaggtgtataaaactgtggagtggagcggtatggtatggaatgacttggaatgtaagctgtcagggagaaaatgttgttacacttttgctaagatctgggggtttcttcatattcctgctgttggaagcagttgaccagaaatgcttgccagtactgccaaagcactgctgtgaaatgtgaagtactttgtttttttatttttaatgattttctttttgttattaatatttttctctgttcctttgttattacttgcatggtttggcgtcagaagtccttacctctttatattgtttgcaggtttaaataaaacagtgtggtgccaaaaaaaaaaaaaaaaaaaaaaaaaaa

SEQ ID NO: 59 - DNA, 1031 bp, Homo Sapiens
agaagctgcctttgtgtcctacagacaggctggggccaaagccattcaaccaatccccagataatccagagctcttgggagcagaaccttaaagagagatcgtggagagagccagggcccagaagaactctctcaaagagaagagggcagccaagatgacccgatggtccagttacctgttgggatggacaaccttccttctctattcctatgagtcaagtggagggatgcatgaggaatgtgtctttcctttcacctacaagggatctgtttacttcacttgcacccatattcatagcttatccccttggtgtgccaccagagccgtgtacaacggccagtggaagtactgccagagtgaagattacccacgctgtatcttccctttcatctatcgaggaaaggcttataacagctgcatctcccagggcagcttcttaggcagtctgtggtgctcagtcacctctgtcttcgatgagaaacagcagtggaaattctgtgaaacgaatgagtatgggggaaattctctcaggaagccctgcatcttcccctccatctacagaaataatgtggtctctgattgcatggaggatgaaagcaacaagctctggtgcccaaccacagagaacatggataaggatggaaagtggagtttctgtgccgacaccagaatttccgcgttggtccctggctttccttgtcactttccgttcaactataaaaacaagaattattttaactgcactaacaaaggatcaaaggagaaccttgtgtggtgtgcaacttcttacaactacgaccaagaccacacctgggtgtattgctgatgctgaggaaaggagaaatatcttcagaggaagactgccgccatactgaggctgagcacagatttgtctttttcattgcatctgtcaagcttaaataaccacctttagaaataccctctgcaccacctgcttcaatcagctggtcctttgtgaagaacgtagagagaatgcggcataaccaccaataaaggagtcttgatttaa

SEQ ID NO: 60 - DNA, 2650 bp, Homo Sapiens
ggagaaggcgagcgcggcagtcgcgccggcgctgggcgaggaagcggagccgggccgcctccggaaaatggctccaaaggttaaatgaagcaggaaaaatacatagatgcagccttgcagcctctccagatgtttggggataatattccagatagaaatattgatcccttggattaggtaactagtcataatgaagaaaattagtcttaaaaccttacggaaatcttttaacttgaataaaagtaaagaagaaactgatttcatggtagtacaacaaccatcgctagccagtgactttggaaaagatgattccttatttggtagctgctatggtaaagatatggccagctgcgatatcaacggtgaagatgaaaaaggcggaaaaaacagatcaaaaagcgagagcctgatgggtacgctaaaaaggcggctttctgcaaaacagaagtcaaaaggcaaggcgggcacaccctctgggagctctgccgacgaggacaccttctcctcctcctcagcacccatagtctttaaagacgtgagagctcagaggccgataaggtccacgtcgctccgcagccatcactacagtcccgcgccgtggcctctgcggcccacaaactccgaggagacctgcatcaagatggaggtgagagtcaaggccttggttcactcttccagcccgagtccagccctgaatggcgtccggaaggatttccacgacctccagtctgagaccacgtgccaggagcaagccaattcactgaagagctcggcttctcataatggagacctgcatcttcacctggatgaacatgtgcctgtcgttattggacttatgcctcaggactacattcagtatactgtgcctttagatgaggggatgtatcctttggaaggatcacggagctattgtctggacagctcttctcccatggaagtctctgcggttcctcctcaagtgggagggcgcgctttccccgaggatgagagtcaggtagaccaggacctagttgtcgccccagagatcttcgtggatcagtccgtgaatggcttgttgattggcaccacgggagtcatgttgcagagcccgagagcgggtcacgatgatgtccctccactctcaccattgctacctccaatgcagaataatcaaatccaaaggaacttcagtggactcactggcacagaagcccacgtggctgaaagtatgcgctgtcatttgaattttgatccgaactctgctcctggggttgcaagagtttatgactcagtgcaaagtagtggtcccatggttgtgacaagccttacagaggagctgaaaaaacttgcaaagcaaggatggtactggggaccaatcacacgttgggaggcagaagggaagctagcaaacgtgccagatggttcttttcttgttcgggacagttctgacgaccgttaccttttaagcttgagctttcgctcccatggtaaaacacttcacactagaattgagcactcaaatggtaggtttagcttttatgaacagccagatgtggaaggacatacgtccatagttgatctaattgagcattcaatcagggactctgaaaatggagctttttgttattcaaggtctcggctgcctggatctgcaacttaccccgtcagactgaccaacccagtgtcccggttcatgcaggtgcgctcgttgcagtacctgtgtcgttttgttatacgtcagtataccagaatagacttaattcagaaactgcctttgccaaacaaaatgaaggattatttacaggagaagcactactgaaagattgagaaccctgcatcttgcactttgggaataagaacaagagattgaaatacagtttacaaactttcattgccatcaaaatcttttgctgccataactatttcagttttatgtgtaaaagagtcatcagtttgtttaggggtggggaagtgtcagcaaggtgtcttgggtttattttggttctttaaaaaagggaagtcttgaggttttagaggtgtgaattatgtttcatcaatgtgcagaataatcacaatgtgaattatcaaattctcctcaatgccccccccgcccagtcctttgctgctatccactgtgatttttatgcattaaaagcacatttcatgtgtattcaaccctaagtaaagttgaatgaaacttaacagaatggaaattgctatgtctttttaaatggtccattttcaaaagacagtgttgaataaacatacctgtgtgataaaacacagaatttacatatacactgaagatgagtttttaatctcttactttaaaaagatttatttagaatcgtgaattgacataatcttgggtaatggaacggagatctgcaacatatcttttaacaacacttttttctaaattatttctaaggttgtgctaattcttttggttgtgaaaagttgaatttttctgttgccttcgttttcatcttctagtttgtctattttaataaatggccttacattaaaaaattgtaaagaaatgtataccaccaatttagaaattgttgccttttctgtaattaaactcgggtacaaattggcataacatgaaaacctatggaactagaattattattaaagaaatattagatgaaaaaaaaaaaaaaaa

SEQ ID NO: 61 - DNA, 2867 bp, Homo Sapiens
caggggtggcagccaactgcaggtgcccaagaacttggcacttctcagttccatctaaaggggcacatctcccttctgggtgtcacgttttcagccaaacatctaaaagaacttcatcatcaagatgtctgatgatattgactggttacgcagccacaggggtgtgtgcaaggtagatctctacaacccagaaggacagcaagatcaggaccggaaagtgatatgctttgtcgatgtgtccaccctgaatgtagaagataaagattacaaggatgctgctagttccagctcagaaggcaacttaaacctgggaagtctggaagaaaaagagattatcgtgatcaaggacactgagaagaaagaccagtctaagacagagggatctgtatgccttttcaaacaagctccctctgatcctgtaagtgtcctcaactggcttctcagtgatctccagaagtatgccttgggtttccaacatgcactgagcccctcaacctctacctgtaaacataaagtaggagacacagagggcgaatatcacagagcatcctctgagaactgctacagtgtctatgccgatcaagtgaacatagattatttgatgaacagacctcaaaacctacgtctagaaatgacagcagctaaaaacaccaacaataatcaaagtccttcagctcctccagccaaacctcctagcactcagagagcagtcatttcccctgatggagaatgttctatagatgacctttccttctacgtcaaccgactatcttctctggtaatccagatggcccataaggaaatcaaggagaagttggaaggtaaaagcaaatgccttcatcattcaatctgtccatcccctgggaacaaagagagaatcagtccccgaactcctgcgagcaagattgcttctgaaatggcctatgaagctgtggaactgacagctgcagaaatgcgtggcactggagaggagtccagggaaggtggccagaaaagctttctatatagcgaattatccaacaagagcaaaagtggagacaaacagatgtcccagagagagagcaaagaatttgcagattccatcagcaaggggctcatggtttatgcaaatcaggtggcatctgacatgatggtctctctcatgaagaccttgaaagtgcacagctctgggaagccaattccagcatctgtggtcctgaagagggtgttgctaaggcacaccaaggagattgtgtccgatttgattgattcttgcatgaagaacctgcataatattactggggtcctgatgactgactcagactttgtctcagctgtcaagagaaatctgttcaaccagtggaaacaaaatgctacagacatcatggaggccatgctgaagcgcttggtcagtgcccttataggtgaggagaaggagactaagtctcagagtctgtcatatgcatctttaaaagctgggtcccatgatcccaaatgcaggaatcagagtcttgaattctccaccatgaaagctgaaatgaaagagagggacaaaggcaaaatgaaatcagacccatgcaagtcactgactagtgctgagaaagtcggtgaacacattctcaaagagggcctaaccatctggaaccaaaagcaaggaaactcatgcaaggtggctaccaaagcatgcagcaataaagatgagaaaggagaaaagatcaatgcttccacagattcactggccaaggacctgattgtctctgcccttaagctgatccagtaccatctgacccagcagactaagggcaaagatacatgtgaagaagactgtcctggttccaccatgggctatatggctcagagtactcaatatgaaaagtgtggaggtggccaaagtgccaaagcactttcagtgaaacaactagaatctcacagagcccctggaccatccacctgtcaaaaggagaaccaacacctggactcccagaaaatggatatgtcaaacatcgttctaatgctgattcagaaactgcttaatgagaaccccttcaaatgtgaggatccatgcgaaggtgagaacaagtgttctgagcccagggcaagcaaagcagcttccatgtccaacagatctgacaaagcggaagaacaatgccaggagcatcaagaacttgactgtaccagtgggatgaagcaagcgaacgggcaatttatagataaactagtagaatctgtgatgaagctctgccttatcatggctaagtatagcaacgatggggcagcccttgctgagttggaagaacaagcagcctcggcaaataagcccaatttcaggggcaccagatgcattcacagtggtgcaatgccacagaactatcaagactctcttggacatgaagtaattgtcaataatcagtgctctacaaatagcttgcagaagcagctccaggctgtcctgcagtggattgcagcctcccagtttaacgtgcccatgctctacttcatgggagataaggatggacaactggaaaagcttcctcaggtttcagctaaagcagcagagaaggggtacagtgtaggaggtcttcttcaagaggtcatgaagtttgccaaggaacggcaaccagatgaagctgtgggaaaggtggccaggaaacagttgctggactggctgctcgctaacctgtgagctgatccttgactcctcttcatcttagcccccctagcagcattccatcccagccagagcacccccaccatcaggccagtcaactgcacaatacacaactgtatttcccaatacacttgagcagttgcctgtgaatgtaagaggtgtcaacaaactgggaaataaaataaaaaaaaataataaaaaaaaaaaaaaaaaaaaaaaa

SEQ ID NO: 62 - DNA, 1501 bp, Homo Sapiens
ggagagagccgccgagccgagccgagccccagctccagcaagagcgcgggcgggtggcccaggcacgcagcggtgaggaccgcggccacagctcggcgccaaccaccgcgggcctcccagccagccccgcggcggggcagccgcaggagccctggctgtggtcggggggcagtgggccatgctgggggcagtggaaggccccaggtggaagcaggcggaggacattagagacatctacgacttccgagatgttctgggcacgggggccttctcggaggtgatcctggcagaagataagaggacgcagaagctggtggccatcaaatgcattgccaaggaggccctggagggcaaggaaggcagcatggagaatgagattgctgtcctgcacaagatcaagcaccccaacattgtagccctggatgacatctatgagagtgggggccacctctacctcatcatgcagctggtgtcgggtggggagctctttgaccgtattgtggaaaaaggcttctacacggagcgggacgccagccgcctcatcttccaggtgctggatgctgtgaaatacctgcatgacctgggcattgtacaccgggatctcaagccagagaatctgctgtactacagcctggatgaagactccaaaatcatgatctccgactttggcctctccaagatggaggacccgggcagtgtgctctccaccgcctgtggaactccgggatacgtggcccctgaagtcctggcccagaagccctacagcaaggctgtggattgctggtccataggtgtcatcgcctacatcttgctctgcggttaccctcccttctatgacgagaatgatgccaaactctttgaacagattttgaaggccgagtacgagtttgactctccttactgggacgacatctctgactctgccaaagatttcatccggcacttgatggagaaggacccagagaaaagattcacctgtgagcaggccttgcagcacccatggattgcaggagatacagctctagataagaatatccaccagtcggtgagtgagcagatcaagaagaactttgccaagagcaagtggaagcaagccttcaatgccacggctgtggtgcggcacatgaggaaactgcagctgggcaccagccaggaggggcaggggcagacggcgagccatggggagctgctgacaccagtggctggggggccggcagctggctgttgctgtcgagactgctgcgtggagccgggcacagaactgtcccccacactgccccaccagctctagggccctggacctcgggtcatgatcctctgcgtgggagggcttgggggcagcctgctccccttccctccctgaaccgggagtttctctgccctgtcccctcctcacctgcttccctaccactcctcactgcattttccatacaaatgtttctattttattgttccttcttgtaataaagggaagataaaaccaaaaaaaaaaaaaaaaaaa

SEQ ID NO: 63 - DNA, 3807 bp, Homo Sapiens
acatgtccttaaccttggcacaacaaatctctaaatcgattgagacctgtctcagatacttcttggtttacaagatggaggctgaaattaaagagaaagatcctcactcaactcacagaggagcagaatgggaagaggacttagtgagaattccctgaacacaggagaaaaccgaagcccagagagtggatggccaagtccaaggtcacacagccaagtgcatccgagcagcgcaggatccaggtttcctgccccagtgctctttctgcagcccatgccacctgttttcatgctatctcagttcaccttccagctacacacctgcaatcagaaacagaaagtctgagagtgtgtgtggagccaaagaggggacagcagtggtgaggccagtttcatgtcttgtgatttattttctccctttctttttggactttaatcttaagtggacagcaatttggaacagtgtcagcaccttgttggattgtgctgtttgggagaggtgacacagagtattttaaaagagcaggttaagaacttttcacaaggaatcaattgagagaaaataaaatagaaacagactgtcccacatttgggctgagcaccaaacacatttttttttttttttttgagactgagtcttgctctgtcactcaggctggaatgcagtggcgcgatctcggctcactgcagccttcacctcccgggttcaagtgattcttctgcctcagcctcccaagtagctgggattacaggtgcccaccaccatgccaggctaatttttgtatttttagtagagacgaggtttcaccatgttggccaggctggtcttgaactcctgaccaagtgatccacctgcttcggcctcccaaagtgctgggattacaggcacgagccaccgcacctggcctcaaacaagctttttaattgcattcagaagtgcaccaactaggcacagacctctggcatggagacagaatgggaggttcttggtgtctggcctggtcttgcagaaatcagggagttgtggggaccaggcagccactgtgcatcagataggagtttcagcagcaggcaacagaaagcctgccaatgtagctgaaataagaagggcttatttttatccctgaacagaagcttccagcactggttcatcagatcagggcactgagctggcatccccatttatacagttttcctttccttcacctttgtaagatgcctggcacagctctgagcatcaaatatctgtgccatgtgggagcacacgaggggacaagtggggaatagggtctcctctgtcctctgtccccaggctggcttctctcgtggtagaaggacccccacagcaccaggcctcataactaccctgctggtaaactgcaggtgctgtcacggcttcctgccttcgtatatgaaatgttccttggcagctggactgctgtttgtttaccgcacgcacagctctgctgcctcttggttacaccagtgagctattgctccatgacaagccacaccgaaatgtagcaagcacttattgttgcccacatgtgtcaagtcagttgagtgtttctgccaaccggggcctggcttggcccaccttggctgagcttgctctggtgctagggtcagctagacaggtcggcaggagaccagctgctctagaagagcctggacaggatgaattggttctccttccacgtgcatcttgcatccctccagccaaggatttgaacccaggtctcgtctgactccaaatgcaccaagaggatggagcccagagtgacacagaggaagaggcccctggatggatgcatggggaagatcacgggaattacaagtgacatcctgaagtatgatcacaaatgtttcaaattaagccttcctgctaagtttccagaggtgtgtggctcggacgaagtgtttccagaccctgatctactgcatgtcctgcctgttgctggttctttgcagcagtccattgaccaatgctgtctacagcttgagagcctctgcaggccagggctgctctgtgcacatcctacgttactattcaaactgcacagcagcatgaaaaacaggcccttcttttctctcatttacacatatgtgaagaagacacagcaagtgagaaaacgtgaccgaaagccacgcggacaggtggccgcagggccaaacccaacttccgtgatgtgatctggctacagtttggagcccacatatttcaatagttatccccaggcctggcacgtcaaagaggctccagaaatgtttgctgagtgagtgatgaatcagcaatttctgattttctcctaaacttagagaataagtggcttgtctgcagtcacccagggcgtccctgacagaggtacaagtaaagcccagatctctgcatctctggttcaaggccttttgtactacacaccgctgtctctttgtcatcattaaaagcaaggctcaagggacatgttttctagccttagttccccatctacaaaatgggcctcatggaatggaatgtctccacttcactccagcatcaacaagtggggaattctgatggattcaattcgacttctttccatgggcgtgttctaagcagcctctttgttccagaagctgccctcagccagagttggataagccaatcctcactccccagcctcctctggatagggatgaagaccccactggggttggaagtgcagaggcagacaggtgtatggagtcacctgtaaattgattcaagtgagccaggaaagcagcaaaggaaagagaaacctgagtgacgacgtggtggaggaacagggctggaaagaggctgctggctgtctggcttcgcagctctggcctcctaatcagcctcgctcttgtctctggtgttctctggctcttgtccatctgtctgtgtttctttttgccagctattgactaatctttgctgaagctgagctagaattctggtgtttataagcaggtaactagctgagcactagttgataactttggagttagtggataaccacagggctgggctactaagctttttcagttgaaaaataaataaataaataaataaacaccacacccagctaatttttgtatttttagtagagacagggtttcaccgtgttagccaggatggactccatctcctgacctcgtgatccgcctacctcggcctcccaaagtgctgggattacaggcgtgagccaccacgcccggtcacctttgtcctgttttctacaggttagaagcaaggcacaagtcatacctacattcaaggagaggggaccatgcaaaggataaactgcagagagacaacagatttacatcccagacacattcacactgggccaagagcagctgccattgcagattcgagtcacgtccttttttccttccttctccttcttggagttacaacagaagctggggaggtgagagtgcagaaaggacgtggatgaagcagagaggcacgtgcctgtctcattcgcctctggatctgctgcatccaggactgtgccagcacaaagtgggagcccgataaatatttattgaagaaatgaaaggtgacaaaaggcagaaggagggagaccccaaaaagagcagcacaggaagctgccccctcaaacactaaaggctcctggagctattcacagtgctggggaacaaccagaggaggaggaggacagagggagagaatactttttttaaaaatcccaaacaaaaccaaattctatacatgtatatctcgagtgagtaaatgtgtaacactcaccaaaaaaaaaaaaaaaaaaaaaaaaaaaa

SEQ ID NO: 64 - DNA, 10412 bp, Homo Sapiens
gtaattgcgagcgagagtgagtggggccgggacccgcagagccgagccgacccttctctcccgggctgcggcagggcagggcggggagctccgcgcaccaacagagccggttctcagggcgctttgctccttgttttttccccggttctgttttctccccttctccggaaggcttgtcaaggggtaggagaaagagacgcaaacacaaaagtggaaaacagttaatgaccagccacggcgtccctgctgtgagctctggccgctgccttccagggctcccgagccacacgctgggggtgctggctgagggaacatggcttgttggcctcagctgaggttgctgctgtggaagaacctcactttcagaagaagacaaacatgtcagctgctgctggaagtggcctggcctctatttatcttcctgatcctgatctctgttcggctgagctacccaccctatgaacaacatgaatgccattttccaaataaagccatgccctctgcaggaacacttccttgggttcaggggattatctgtaatgccaacaacccctgtttccgttacccgactcctggggaggctcccggagttgttggaaactttaacaaatccattgtggctcgcctgttctcagatgctcggaggcttcttttatacagccagaaagacaccagcatgaaggacatgcgcaaagttctgagaacattacagcagatcaagaaatccagctcaaacttgaagcttcaagatttcctggtggacaatgaaaccttctctgggttcctgtatcacaacctctctctcccaaagtctactgtggacaagatgctgagggctgatgtcattctccacaaggtatttttgcaaggctaccagttacatttgacaagtctgtgcaatggatcaaaatcagaagagatgattcaacttggtgaccaagaagtttctgagctttgtggcctaccaagggagaaactggctgcagcagagcgagtacttcgttccaacatggacatcctgaagccaatcctgagaacactaaactctacatctcccttcccgagcaaggagctggctgaagccacaaaaacattgctgcatagtcttgggactctggcccaggagctgttcagcatgagaagctggagtgacatgcgacaggaggtgatgtttctgaccaatgtgaacagctccagctcctccacccaaatctaccaggctgtgtctcgtattgtctgcgggcatcccgagggaggggggctgaagatcaagtctctcaactggtatgaggacaacaactacaaagccctctttggaggcaatggcactgaggaagatgctgaaaccttctatgacaactctacaactccttactgcaatgatttgatgaagaatttggagtctagtcctctttcccgcattatctggaaagctctgaagccgctgctcgttgggaagatcctgtatacacctgacactccagccacaaggcaggtcatggctgaggtgaacaagaccttccaggaactggctgtgttccatgatctggaaggcatgtgggaggaactcagccccaagatctggaccttcatggagaacagccaagaaatggaccttgtccggatgctgttggacagcagggacaatgaccacttttgggaacagcagttggatggcttagattggacagcccaagacatcgtggcgtttttggccaagcacccagaggatgtccagtccagtaatggttctgtgtacacctggagagaagctttcaacgagactaaccaggcaatccggaccatatctcgcttcatggagtgtgtcaacctgaacaagctagaacccatagcaacagaagtctggctcatcaacaagtccatggagctgctggatgagaggaagttctgggctggtattgtgttcactggaattactccaggcagcattgagctgccccatcatgtcaagtacaagatccgaatggacattgacaatgtggagaggacaaataaaatcaaggatgggtactgggaccctggtcctcgagctgacccctttgaggacatgcggtacgtctgggggggcttcgcctacttgcaggatgtggtggagcaggcaatcatcagggtgctgacgggcaccgagaagaaaactggtgtctatatgcaacagatgccctatccctgttacgttgatgacatctttctgcgggtgatgagccggtcaatgcccctcttcatgacgctggcctggatttactcagtggctgtgatcatcaagggcatcgtgtatgagaaggaggcacggctgaaagagaccatgcggatcatgggcctggacaacagcatcctctggtttagctggttcattagtagcctcattcctcttcttgtgagcgctggcctgctagtggtcatcctgaagttaggaaacctgctgccctacagtgatcccagcgtggtgtttgtcttcctgtccgtgtttgctgtggtgacaatcctgcagtgcttcctgattagcacactcttctccagagccaacctggcagcagcctgtgggggcatcatctacttcacgctgtacctgccctacgtcctgtgtgtggcatggcaggactacgtgggcttcacactcaagatcttcgctagcctgctgtctcctgtggcttttgggtttggctgtgagtactttgccctttttgaggagcagggcattggagtgcagtgggacaacctgtttgagagtcctgtggaggaagatggcttcaatctcaccacttcggtctccatgatgctgtttgacaccttcctctatggggtgatgacctggtacattgaggctgtctttccaggccagtacggaattcccaggccctggtattttccttgcaccaagtcctactggtttggcgaggaaagtgatgagaagagccaccctggttccaaccagaagagaatatcagaaatctgcatggaggaggaacccacccacttgaagctgggcgtgtccattcagaacctggtaaaagtctaccgagatgggatgaaggtggctgtcgatggcctggcactgaatttttatgagggccagatcacctccttcctgggccacaatggagcggggaagacgaccaccatgtcaatcctgaccgggttgttccccccgacctcgggcaccgcctacatcctgggaaaagacattcgctctgagatgagcaccatccggcagaacctgggggtctgtccccagcataacgtgctgtttgacatgctgactgtcgaagaacacatctggttctatgcccgcttgaaagggctctctgagaagcacgtgaaggcggagatggagcagatggccctggatgttggtttgccatcaagcaagctgaaaagcaaaacaagccagctgtcaggtggaatgcagagaaagctatctgtggccttggcctttgtcgggggatctaaggttgtcattctggatgaacccacagctggtgtggacccttactcccgcaggggaatatgggagctgctgctgaaataccgacaaggccgcaccattattctctctacacaccacatggatgaagcggacgtcctgggggacaggattgccatcatctcccatgggaagctgtgctgtgtgggctcctccctgtttctgaagaaccagctgggaacaggctactacctgaccttggtcaagaaagatgtggaatcctccctcagttcctgcagaaacagtagtagcactgtgtcatacctgaaaaaggaggacagtgtttctcagagcagttctgatgctggcctgggcagcgaccatgagagtgacacgctgaccatcgatgtctctgctatctccaacctcatcaggaagcatgtgtctgaagcccggctggtggaagacatagggcatgagctgacctatgtgctgccatatgaagctgctaaggagggagcctttgtggaactctttcatgagattgatgaccggctctcagacctgggcatttctagttatggcatctcagagacgaccctggaagaaatattcctcaaggtggccgaagagagtggggtggatgctgagacctcagatggtaccttgccagcaagacgaaacaggcgggccttcggggacaagcagagctgtcttcgcccgttcactgaagatgatgctgctgatccaaatgattctgacatagacccagaatccagagagacagacttgctcagtgggatggatggcaaagggtcctaccaggtgaaaggctggaaacttacacagcaacagtttgtggcccttttgtggaagagactgctaattgccagacggagtcggaaaggattttttgctcagattgtcttgccagctgtgtttgtctgcattgcccttgtgttcagcctgatcgtgccaccctttggcaagtaccccagcctggaacttcagccctggatgtacaacgaacagtacacatttgtcagcaatgatgctcctgaggacacgggaaccctggaactcttaaacgccctcaccaaagaccctggcttcgggacccgctgtatggaaggaaacccaatcccagacacgccctgccaggcaggggaggaagagtggaccactgccccagttccccagaccatcatggacctcttccagaatgggaactggacaatgcagaacccttcacctgcatgccagtgtagcagcgacaaaatcaagaagatgctgcctgtgtgtcccccaggggcaggggggctgcctcctccacaaagaaaacaaaacactgcagatatccttcaggacctgacaggaagaaacatttcggattatctggtgaagacgtatgtgcagatcatagccaaaagcttaaagaacaagatctgggtgaatgagtttaggtatggcggcttttccctgggtgtcagtaatactcaagcacttcctccgagtcaagaagttaatgatgccatcaaacaaatgaagaaacacctaaagctggccaaggacagttctgcagatcgatttctcaacagcttgggaagatttatgacaggactggacaccaaaaataatgtcaaggtgtggttcaataacaagggctggcatgcaatcagctctttcctgaatgtcatcaacaatgccattctccgggccaacctgcaaaagggagagaaccctagccattatggaattactgctttcaatcatcccctgaatctcaccaagcagcagctctcagaggtggctctgatgaccacatcagtggatgtccttgtgtccatctgtgtcatctttgcaatgtccttcgtcccagccagctttgtcgtattcctgatccaggagcgggtcagcaaagcaaaacacctgcagttcatcagtggagtgaagcctgtcatctactggctctctaattttgtctgggatatgtgcaattacgttgtccctgccacactggtcattatcatcttcatctgcttccagcagaagtcctatgtgtcctccaccaatctgcctgtgctagcccttctacttttgctgtatgggtggtcaatcacacctctcatgtacccagcctcctttgtgttcaagatccccagcacagcctatgtggtgctcaccagcgtgaacctcttcattggcattaatggcagcgtggccacctttgtgctggagctgttcaccgacaataagctgaataatatcaatgatatcctgaagtccgtgttcttgatcttcccacatttttgcctgggacgagggctcatcgacatggtgaaaaaccaggcaatggctgatgccctggaaaggtttggggagaatcgctttgtgtcaccattatcttgggacttggtgggacgaaacctcttcgccatggccgtggaaggggtggtgttcttcctcattactgttctgatccagtacagattcttcatcaggcccagacctgtaaatgcaaagctatctcctctgaatgatgaagatgaagatgtgaggcgggaaagacagagaattcttgatggtggaggccagaatgacatcttagaaatcaaggagttgacgaagatatatagaaggaagcggaagcctgctgttgacaggatttgcgtgggcattcctcctggtgagtgctttgggctcctgggagttaatggggctggaaaatcatcaactttcaagatgttaacaggagataccactgttaccagaggagatgctttccttaacaaaaatagtatcttatcaaacatccatgaagtacatcagaacatgggctactgccctcagtttgatgccatcacagagctgttgactgggagagaacacgtggagttctttgcccttttgagaggagtcccagagaaagaagttggcaaggttggtgagtgggcgattcggaaactgggcctcgtgaagtatggagaaaaatatgctggtaactatagtggaggcaacaaacgcaagctctctacagccatggctttgatcggcgggcctcctgtggtgtttctggatgaacccaccacaggcatggatcccaaagcccggcggttcttgtggaattgtgccctaagtgttgtcaaggaggggagatcagtagtgcttacatctcatagtatggaagaatgtgaagctctttgcactaggatggcaatcatggtcaatggaaggttcaggtgccttggcagtgtccagcatctaaaaaataggtttggagatggttatacaatagttgtacgaatagcagggtccaacccggacctgaagcctgtccaggatttctttggacttgcatttcctggaagtgttctaaaagagaaacaccggaacatgctacaataccagcttccatcttcattatcttctctggccaggatattcagcatcctctcccagagcaaaaagcgactccacatagaagactactctgtttctcagacaacacttgaccaagtatttgtgaactttgccaaggaccaaagtgatgatgaccacttaaaagacctctcattacacaaaaaccagacagtagtggacgttgcagttctcacatcttttctacaggatgagaaagtgaaagaaagctatgtatgaagaatcctgttcatacggggtggctgaaagtaaagaggaactagactttcctttgcaccatgtgaagtgttgtggagaaaagagccagaagttgatgtgggaagaagtaaactggatactgtactgatactattcaatgcaatgcaattcaatgcaatgaaaacaaaattccattacaggggcagtgcctttgtagcctatgtcttgtatggctctcaagtgaaagacttgaatttagttttttacctatacctatgtgaaactctattatggaacccaatggacatatgggtttgaactcacacttttttttttttttttgttcctgtgtattctcattggggttgcaacaataattcatcaagtaatcatggccagcgattattgatcaaaatcaaaaggtaatgcacatcctcattcactaagccatgccatgcccaggagactggtttcccggtgacacatccattgctggcaatgagtgtgccagagttattagtgccaagtttttcagaaagtttgaagcaccatggtgtgtcatgctcacttttgtgaaagctgctctgctcagagtctatcaacattgaatatcagttgacagaatggtgccatgcgtggctaacatcctgctttgattccctctgataagctgttctggtggcagtaacatgcaacaaaaatgtgggtgtctccaggcacgggaaacttggttccattgttatattgtcctatgcttcgagccatgggtctacagggtcatccttatgagactcttaaatatacttagatcctggtaagaggcaaagaatcaacagccaaactgctggggctgcaagctgctgaagccagggcatgggattaaagagattgtgcgttcaaacctagggaagcctgtgcccatttgtcctgactgtctgctaacatggtacactgcatctcaagatgtttatctgacacaagtgtattatttctggctttttgaattaatctagaaaatgaaaagatggagttgtattttgacaaaaatgtttgtactttttaatgttatttggaattttaagttctatcagtgacttctgaatccttagaatggcctctttgtagaaccctgtggtatagaggagtatggccactgccccactatttttattttcttatgtaagtttgcatatcagtcatgactagtgcctagaaagcaatgtgatggtcaggatctcatgacattatatttgagtttctttcagatcatttaggatactcttaatctcacttcatcaatcaaatattttttgagtgtatgctgtagctgaaagagtatgtacgtacgtataagactagagagatattaagtctcagtacacttcctgtgccatgttattcagctcactggtttacaaatataggttgtcttgtggttgtaggagcccactgtaacaatactgggcagcctttttttttttttttttaattgcaacaatgcaaaagccaagaaagtataagggtcacaagtctaaacaatgaattcttcaacagggaaaacagctagcttgaaaacttgctgaaaaacacaacttgtgtttatggcatttagtaccttcaaataattggctttgcagatattggataccccattaaatctgacagtctcaaatttttcatctcttcaatcactagtcaagaaaaatataaaaacaacaaatacttccatatggagcatttttcagagttttctaacccagtcttatttttctagtcagtaaacatttgtaaaaatactgtttcactaatacttactgttaactgtcttgagagaaaagaaaaatatgagagaactattgtttggggaagttcaagtgatctttcaatatcattactaacttcttccactttttccagaatttgaatattaacgctaaaggtgtaagacttcagatttcaaattaatctttctatattttttaaatttacagaatattatataacccactgctgaaaaagaaaaaaatgattgttttagaagttaaagtcaatattgattttaaatataagtaatgaaggcatatttccaataactagtgatatggcatcgttgcattttacagtatcttcaaaaatacagaatttatagaataatttctcctcatttaatatttttcaaaatcaaagttatggtttcctcattttactaaaatcgtattctaattcttcattatagtaaatctatgagcaactccttacttcggttcctctgatttcaaggccatattttaaaaaatcaaaaggcactgtgaactattttgaagaaaacacaacattttaatacagattgaaaggacctcttctgaagctagaaacaatctatagttatacatcttcattaatactgtgttaccttttaaaatagtaattttttacattttcctgtgtaaacctaattgtggtagaaatttttaccaactctatactcaatcaagcaaaatttctgtatattccctgtggaatgtacctatgtgagtttcagaaattctcaaaatacgtgttcaaaaatttctgcttttgcatctttgggacacctcagaaaacttattaacaactgtgaatatgagaaatacagaagaaaataataagccctctatacataaatgcccagcacaattcattgttaaaaaacaaccaaacctcacactactgtatttcattatctgtactgaaagcaaatgctttgtgactattaaatgttgcacatcattcattcactgtatagtaatcattgactaaagccatttgtctgtgttttcttcttgtggttgtatatatcaggtaaaatattttccaaagagccatgtgtcatgtaatactgaaccactttgatattgagacattaatttgtacccttgttattatctactagtaataatgtaatactgtagaaatattgctctaattcttttcaaaattgttgcatcccccttagaatgtttctatttccataaggatttaggtatgctattatcccttcttataccctaagatgaagctgtttttgtgctctttgttcatcattggccctcattccaagcactttacgctgtctgtaatgggatctatttttgcactggaatatctgagaattgcaaaactagacaaaagtttcacaacagatttctaagttaaatcattttcattaaaaggaaaaaagaaaaaaaattttgtatgtcaataactttatatgaagtattaaaatgcatatttctatgttgtaatataatgagtcacaaaataaagctgtgacagttctgttggtctacagaaa

SEQ ID NO: 65 - DNA, 2208 bp, Homo Sapiens
gaggaagaggtggcggcggtggcggtggtcgtagcggtggcggaggaggcgggtacgaatcagctgcgggcggagacatggccaacatcgcggtgcagcgaatcaagcgggagttcaaggaggtgctgaagagcgaggagacgagcaaaaatcaaattaaagtagatcttgtagatgagaattttacagaattaagaggagaaatagcaggacctccagacacaccatatgaaggaggaagataccaactagagataaaaataccagaaacatacccatttaatccccctaaggtccggtttatcactaaaatatggcatcctaatattagttccgtcacaggggctatttgtttggatatcctgaaagatcaatgggcagctgcaatgactctccgcacggtattattgtcattgcaagcactattggcagctgcagagccagatgatccacaggatgctgtagtagcaaatcagtacaaacaaaatcccgaaatgttcaaacagacagctcgactttgggcacatgtgtatgctggagcaccagtttctagtccagaatacaccaaaaaaatagaaaacctatgtgctatgggctttgataggaatgcagtaatagtggccttgtcttcaaaatcatgggatgtagagactgcaacagaattgcttctgagtaactgaggcatagagagctgctgatatagtcaagcttgcctcttcttgaggagcaccaacatctgttatttttaggattctgcatagatttcttttaaactggcattcttgcctaatgatgttatctaggcaccattggagactgaaaaaaaaaaatccctgctctgtaaataaagctaattaaacgtctgtgtaaatttaaaaaggggaaatactttaattttttttcttaatagtgtaaaaattccctgagctaagctaaaaccatggaagaaacatgctactttagtgtttagcagtgtaccaagactagcaagagtttgcttcaggattttgttgaataattaagataatattttgagtgtgtcagggccattcaaattgttggtgttgcatcacagctaccttaactgtttttaacatggatcctctgtgcctgtgaatttacttgcatgcttgtacttgacttcttaggatgggtagctgaaaagaccaccattttaagcatttgagaattcttaaatatgaaatttattcagaattgaagatggtgacctattcagagcctttttgtccttgtcaacagactgggacagtgtctgattcccccttcaccccccccacccccgccttgccacacacagctaatattctaatggtaaatttctctgtatcaggtggggaaatgtgctgaaggacagtatgtatcccttgcttcatttttaggtcgtaggtttggaatgtcttgtcccagttcttcaaacactcttaaatttttcttaagtaatgtaaaaatggaactgccaattttatttctcttgcaaaaatagtaaatacttgatgttacattattcccaggtttaatgaaagaacccaacttagtttttcagtgaatttgacacctattttttagtgatgaaatttttctttgagaactggcaaggatgcagtcagctgtttgcagtttttagcctgattttggggtctatagagattgctttattggatacttcaagtcattcttgcttgcacttcccctattgacacatgaaagctgtgttggtgttttattgtacatacttcagatgcacataggaatagaagtgtgttataaatctagctttctttatgatgtttctgataatacgagaattgaaaactttaccttctcttgtacatagtcagactatttgtattaaatttacatttcattctaagttcaaaagtttgaaaattattagttttgcaagatcacacactaatgtaaccattttatgaaggttgaagtggatttatgcaggcagttctatatatagaaatacaattctttttaaatttttaggaccaatacaaaataacaaaaatgtaatggaatcagactgaattaaagtaaggctgtatattgaaagtcatattataaaaggtttgctttctttaagtgttatttatcttaaattataatcgttaaatgtttggaagataatttttgaatcataacgtcagcataacttcatttgacttctcaataatcttg

SEQ ID NO: 66 - DNA, 1681 bp, Homo Sapiens
cacagccggccgacaccacaccagccggggagccgccgccgccgccgccacctctgagcagccggctgggagcgagagccgacagctagtctgcaagccaccgctgtcgccatggggagccgcgtctcgcgggaagacttcgagtgggtctacaccgaccagccgcacgccgaccggcgccgggagatcctggcaaagtatccagagataaagtccttgatgaaacctgatcccaatttgatatggattataattatgatggttctcacccagttgggtgcattttacatagtaaaagacttggactggaaatgggtcatatttggggcctatgcgtttggcagttgcattaaccactcaatgactctggctattcatgagattgcccacaatgctgcctttggcaactgcaaagcaatgtggaatcgctggtttggaatgtttgctaatcttcctattgggattccatattcaatttcctttaagaggtatcacatggatcatcatcggtaccttggagctgatggcgtcgatgtagatattcctaccgattttgagggctggttcttctgtaccgctttcagaaagtttatatgggttattcttcagcctctcttttatgcctttcgacctctgttcatcaaccccaaaccaattacgtatctggaagttatcaataccgtggcacaggtcacttttgacattttaatttattactttttgggaattaaatccttagtctacatgttggcagcatctttacttggcctgggtttgcacccaatttctggacattttatagctgagcattacatgttcttaaagggtcatgaaacttactcatattatgggcctctgaatttacttaccttcaatgtgggttatcataatgaacatcatgatttccccaacattcctggaaaaagtcttccactggtgaggaaaatagcagctgaatactatgacaacctccctcactacaattcctggataaaagtactgtatgattttgtgatggatgatacaataagtccctactcaagaatgaagaggcaccaaaaaggagagatggtgctggagtaaatatcattagtgccaaagggattcttctccaaaactttagatgataaaattagccgggcgtggcggcacatgcctgtaatcccagctacatgggaggctgaggtgggagaattgcttgaacccaggaggcggaggcagaggctgcagtgacccaagattgtgccactgcactccaccctgggcaacagagcaagaccccatctcaaaaataaataaatatatataaaaaataaaaagctatttctagtttatttcactataaagttttgctttattaaaaagctaataaacagctattaatcacagtgtattagtatttgttacatttttgtatttcactatctttatactatataatatggtaacttgggtaccgggggaactttaaaatttcatctcaaaaataatttttaaaaagcctgaggtatgatatagcataaaagattgagatgaaaatatatttccctgtaagctgaattactcatttaaaaattttaacttctatatgggacccgaattagacactgctgaatcctgtacagccttactcataaataaagtacttactgaatttccaccattcaaaaaaaaaaaaaaa

SEQ ID NO: 67 - DNA, 2900 bp, Homo Sapiens
agcgggtttcgtgtccgctgcgtttgggttccggtctccgcttctccagtggccccggtggctccaccgcagcgtctggcgcgctgggacctgcacaggccggagagagccgtaggcaggaccccgggacaccctggaagccaggaaatggactcagtggcctctgaggatgtggctgtgaacttcacacttgaggagtgggctttgctggatccttcccagaagaaactctacagagatgtgatgcgggaaacctttagaaacctggcctgtgtaggaaaaaaatgggaagaccagagcattgaagattggtacaaaaatcaggggagaattttaagaaatcatatggaagagggactcagtgaaagtaaagaatatgatcaatgtggagaagccttcagtcagattctcaatcttaatctgaacaagaaaattcctactatagtaagaccatgtgaatgtagtttgtgtgggaaagtcttcatgcatcattcatcccttagtaggcacatcagatctcaccttggacacaaaccatatgactatcaggaatatggagagaaaccatataaatgtaagcagtgtgggaaagccttcagttcttgtcaatcctttcgaagacatgaaagaactcacactggtgagaaaccctatgcatgtccggaatgtgggaaagccttcatttctctcccaagtgttcgaagacacatgattaagcacactggagatggaccatataaatgtcaggaatgtgggaaagcctttgatcgcccaagtttatttcagatacatgaaagaactcacactggagagaaaccctatgaatgtcaggaatgtgcaaaagctttcatttctcttccaagttttcaaagacacatgattaggcacactggagatggaccttataaatgtcaggaatgtggaaaagcctttgaccgccccagtttatttcgaatacatgaaagaactcatactggagagaaaccccatgaatgtaaacagtgtgggaaggccttcatttctttcacaaattttcaaagtcatatgattaggcacactggggatggaccttataaatgtaaagtatgtgggagagcctttatttttcccagttatgttcgaaagcatgaaagaactcatactggggagaaaccctatgaatgtaataaatgtggtaaaaccttcagttcttccagtaatgttcgaacacatgaaaggactcacactggagagaagccctatgaatgtaaggaatgcgggaaagccttcatttctctcccaagtgtccgaagacacatgataaagcacactggagatggaccttataaatgtcaggtatgtggtagagcctttgactgtcccagttcatttcaaatacacgaaagaactcacactggagagaaaccctatgaatgtcaggtatgtgggaaagccttcatttctcttaaaaggattagaaaacatatgatactgcacactggagatggaccttataaatgtcaggtatgtggtaaagcctttgactgtcctagttctgtccgaacacatgaaagaactcatactggagaaaaaccctatgaatgtaaagaatgtgggaaagcattcaattatgccagttccattagaatacatgaaagaactcataccggagaaaaaccctatgaatgtaagcaatgtggaaaaacgttcagttattccagttcctttcaaagacatgaaagagctcataatggagataaaccttacgtaaagaatgtgggaaagctttcatttatcacacaaccttcgaatacctgtgaaaatgaatagtggaggacaggtctacaagtatctacatatctaaagaatatggaaagtcttcagtttgctttctgggtttcagacttgtttgggagctcacccctttctcctgtttctcacttttggaataggaatctctatcctgtgcctgtctcatattttggaaatacatgactagtttggttttcaccggttcggagctgaagaagaattttgcctcagcatgaattgagtctcatccatatctgagtgatgtgatattgagatgacactttggagtttgagtttaaacattaggcttcatgctggaattaactgagacttttgaggcctttgggatgagatgaatatattttacatgtgatgacatggattttgggggccagaggtgtaatgttttggctgagtgtatgccacctcagattcatatgttgaaaccttacccccgtgccccccctctcccccacaatgtgatggtatttggaggccctgtctctggtggtttttaggattggaggacatcatgaagatggaggccttgtaattgggattagtttcctgataggaatccctagagagctagctttgcccttcaccatgagagggtgcagtgagaagatagctatctttgaaccgggaagcaggcccttaccagacatggactatgccagtgccttgatattggacttcccagcctcccaaaccatgagaaataaatgtttgttgattaattaagctttccaatttatggtattttgttttagcaacccaagctaagacacaatccaattttaaaatggaggaaaggacttgaatagacatttctccaaagaagatacccagatggccaataagcacgtaacaatgctcgacatctttagtcattagggaaatacaaatcaaactcaagacatacatagcatctcattaggattagtagtatcaaagatggaaaacaagaaatactgtcaaggatgtggaatgttggagaacattgtgcactatcactgggaatgtacagtggtataagcctgctgaaaacagtatggcagatccccagattaaaatatagaaataacatatgaaaaaaaaaaaaaaaa

SEQ ID NO: 68 - DNA, 3503 bp, Homo Sapiens
aaaatttcccgggccgggagcgctgggcctgccgggaaggcgctgggacggttacccagcgggccgccggcggtcgtgggcaagcttcgccatgcagagcactgacctaggcaacaaggagagcggcaagatatggcaccgcaagccgtccccggccacgcgggacggaattatagtgaacattattcacaacacttccgattaccatccaaaagttttgcgatttttgaatgtggcttttgacggcacaggcgactgcttaattgctggggaccaccaaggaaatatttatgtttttgacttacatggaaacaggttcaatcttgttcagcgaacagcacaagcttgcacagctctggcctttaatcttcgtaggaaatctgaattccttgtggcattagctgattattctattaaatgttttgatacagtcaccaaggagctagttagctggatgagaggacatgaatcatcagtattttcgatctctgtgcatgcatcagggaaatatgccatcacaacttcttctgatacagcacaattatgggacttggatacctttcagagaaaaagaaagctgaatattcgccagtctgtgggtatacagaaggttttctttctaccattaagtaataccatcctcagctgttttaaagataattccatttttgcctgggaatgtgacacacttttttgcaaatatcaattgccagctccacctgaaagctctagtatattatacaaagtgtttgctgtaaccagagatggccgaatcctggctgctggaggcaagtcaaatcatcttcatttgtggtgcttggaagctaggcagctctttagaattatccagatgcccactaaagttcgagccattcgccatctggaatttcttcctgatagttttgatgctggttctaatcaggttcttggagtactaagtcaagatggtattatgagatttatcaatatgcagacttgtaaacttctctttgagattgggagcctcgatgaaggaattagctcatcagcaattagcccacatggacggtacattgcatctattatggaaaatggaagtctaaacatatattcagttcaggctttaacacaagaaataaataagccacctccgcctttagtgaaagttattgaagatttgcccaataataaactgagttccagtgatcttaagatgaaagtaacatcagggagagtacagcagccagcaaaatctagggaaagcaaaatgcaaactagaatattaaaacaagacctgactggtgattttgaaagtaaaaagaatgaattaccagatggattaaacaaaaagcgtttacaaatcttattaaaaggctatggtgaatatccaacaaaatacagaatgttcatttggcgctctctgctacaactgcctgaaaatcatactgcgtttagtaccctcatagataaggggactcatgtggcgtttctcaaccttcagaagaaataccccatcaaaagtaggaagctactcagagtattacagagaaccttatctgcattagctcactggtctgtcatttttagtgacacaccatatcttccactcttggcatttccatttgtaaaattattccagaacaaccaactcatctgttttgaagttattgctactctcataatcaattggtgtcaacactggtttgaatattttcctaatcctcctatcaatattcttagcatgatagaaaatgttttggcatttcatgacaaggaactgctgcaacacttcatagatcatgatataacctcccagctatatgcatggcctcttcttgaaactgtgttctcagaagtgctgacaagagaggagtggctgaaattgttcgataatatcttttccaaccatccttccttccttctgatgactgttgtagcctacaacatatgttctagaacgcctctgctcagctgtaatcttaaagatgactttgagtttttttttcaccatcggaataacctggatataaatgttgtgattagacaagtttatcatctcatggagaccacgcctactgacattcatccagacagcatgcttaatgtttttgttgcactgacaaaagggcagtatccagtatttaatcaatatccaaagtttattgtggactatcaaacacaggaacgagaaagaataaggaatgatgaattggattacttaagagagaggcagacagttgaagatatgcaagctaaagtcgaccagcaaagagttgaagatgaagcttggtaccagaaacaggagctgcttcgtaaagctgaagaaacaagaagagaaatgctcttacaagaggaggagaaaatgatacaacaaagacagaggctagctgctgtgaaaagagagctgaaagtaaaggaaatgcacttacaagatgctgcaagaaggcgttttctgaagcttcagcaagatcaacaggaaatggagctaagaagactggatgatgaaattgggagaaaggtatatatgagagatcgagaaattgctgccacagccagagacctagaaatgagacagctggaactcgaatcacaaaagagactttatgagaagaatcttactgaaaatcaagaagctcttgcaaaagaaatgcgagcagatgcagatgcctatagacgaaaagtggatcttgaagaacacatgtttcataagctgatagaagcaggtgaaacccagagccagaaaactcagaaggtgattaaagaaaatttggcaaaggctgaacaagcatgcctaaataccgactggcagattcagtctttacataaacaaaaatgtgatgatctacaacgaaacaaatgttaccaggaagtagccaaactccttagggaaaacagaaggaaagaaatagagataataaatgcaatggtggaggaggaagccaagaagtggaaggaagctgaaggaaaagagttccgtttgagatcagcaaagaaagcttctgctctttcagatgcgtctagaaagtggtttttaaagcaagagataaatgcggctgtagaacatgctgaaaatccatgtcataaagaagaacccaggttccaaaatgaacaggactcaagctgtttgcctagaacctcacaattaaatgactcttctgaaatggatccctcaacacagatttctttaaatagaagagcagtagaatgggacaccacgggacagaatcttattaagaaagtgagaaatcttcgccagagactcactgcccgggctcgtcacagatgtcaaacccctcatcttttggctgcatagaatgcatgtcaccttgagacggtcgagagagagacctattttgcaatcagtgacattgatttttagattatttatttaaaattcctataaagatcagccctttgtacagaaaaatgtgtctataaaaattatgtgttatttaattctgatactttttggcttgtaaatggcttcttgaactttttacaataaaaatgttttagaaactgtt

SEQ ID NO: 69 - DNA, 4379 bp, Homo Sapiens
gacggcgggagccgctgctctccggctgagggaatcagagacagctccgtccctagtggagcgcaggggaggcagaagtcatgacaggcgaggtgggttctgaggttcacctagaaatcaatgacccaaacgtcatttcacaagaggaagcagatagtccttcagatagtggacagggcagctatgaaacaattggacccttgagtgaaggagattcagatgaagagatatttgtaagtaagaagttgaaaaacaggaaggttctacaagacagtgattccgaaacagaggacacaaatgcctctccagagaaaactacctatgacagtgccgaggaggaaaataaagagaatttatatgctgggaaaaatacaaaaatcaaaaggatttacaaaactgtggcagacagtgatgaaagttacatggaaaagtctttgtatcaggaaaatcttgaagcgcaagtgaaaccttgcttagagctgagtcttcagtctggaaactctacagactttaccactgacagaaagagttccaaaaagcacatacatgataaagaaggaactgcaggaaaagcaaaagtaaaatcaaaaagaagacttgagaaagaggagagaaaaatggaaaaaattagacagctaaaaaagaaggaaacaaaaaaccaggaagatgatgtagaacagccatttaatgacagtggctgtcttcttgtggataaagacctttttgaaactgggttggaggatgaaaataactctccattggaagatgaagagtcattagaatcaataagagcagctgtaaaaaacaaagtaaaaaagcacaagaaaaaagaaccatctttggagagtggggtccattcatttgaggaaggaagtgagttatcaaaaggaaccacgaggaaggaaagaaaggcagccagattaagtaaagaagcattaaaacaactgcatagtgagactcagcgccttattcgagagtctgcactgaaccttccatatcatatgcctgagaataaaaccattcatgatttcttcaaacgtaaaccccggcccacttgccacggaaatgccatggcactattgaagtcatctaaatatcagtcaagccatcacaaagaaatcatagacactgcaaatactactgaaatgaacagtgatcaccatagtaaaggttctgagcagacaacaggtgcagaaaatgaagtggaaactaatgcactccctgtagtttcaaaggaaacccagatcattactggatcagatgagtcttgcaggaaggatttggtaaaaaatgaagagctagaaattcaggagaaacagaagcagagtgacattagaccttcacctggggacagctcagtgttgcaacaggaatccaacttcctcgggaacaatcacagtgaggaatgtcaggttggagggcttgtagcatttgaacctcatgccctggagggtgaaggcccccaaaatccagaagaaacagatgagaaagtggaagagcctgagcagcaaaataaatcatcagcagttgggccacctgaaaaagtgagacggtttactctggatagacttaagcaactgggagtagatgtttccattaaaccacggctaggtgctgatgaagattcctttgtgatacttgaacctgaaaccaacagagaactggaagccttgaagcagcgtttctggaagcatgctaatccagcagccaaacccagggctggtcagacagtgaatgtgaacgtcatagtgaaagacatgggcactgatggaaaggaagagctaaaagcagatgtggtacctgtgactttagcacctaagaagttggatggagcaagccacacaaaaccaggtgaaaagcttcaggtgttaaaagctaaactgcaagaagcaatgaaactccgaaggtttgaggagcgccagaagcgccaagcactgtttaaattagataatgaagatgggtttgaggaagaggaggaggaagaggaagaaatgacagatgagtctgaggaagatggagaagagaaggtagagaaagaagagaaagaggaagaactagaggaagaggaggagaaagaagaggaggaggaagaagaaggaaatcaggagactgcagaattccttcttagtagtgaagaaatagaaacaaaagatgaaaaagaaatggataaagaaaataatgatggcagtagtgaaattggcaaggcagttggcttcctctctgttcccaagtctctctcatcagattctactttacttctgtttaaggacagctcttccaagatgggttactttcctactgaagaaaaatcagaaacagatgaaaactcaggcaagcagcctagcaaactggatgaggatgattcatgttcattgctaacaaaggagagcagccacaatagcagctttgagctgattggctccacgattccatcctatcagccttgcaacagacaaacaggccgtgggaccagttttttccctacagcaggaggattcagatctccttcccctgggctatttcgagccagtttggtcagctcagcttctaagagttcagggaaactgtctgagccttcacttcccatagaggattcccaggatctgtataacgcctccccagagcctaagacacttttcctaggagcaggagacttccagttctgtttagaagatgacactcagagccaactgttggatgcagatgggttcttaaatgttagaaaccacaggaatcagtaccaagctttgaagcctcgattgccattggccagtatggatgagaatgccatggatgccaacatggatgagctgttggatttgtgtactggaaagttcacatctcaggctgaaaaacatctacccaggaagagtgacaagaaagagaacatggaggaacttctgaacctttgttcaggaaaattcacttctcaggatgcctccactccagcctcatcagagttaaataaacaggagaaggagagcagcatgggtgatccaatggaagaagcacttgctctttgctcaggctcttttcccacagacaaggaagaggaagacgaggaggaggaatttggagactttcggcttgtttcaaatgataatgagtttgatagtgatgaggatgaacacagtgactctggtaatgatctggcactggaagaccatgaagatgatgatgaagaagaactcctgaagcgatctgagaagttgaaaaggcaaatgaggttgaggaaatacctggaggatgaggcagaggtgtcaggaagtgatgtgggaagcgaagatgagtatgatggggaagaaattgatgaatatgaagaggacgtaattgatgaagtacttccttctgatgaggaactgcagagtcaaatcaagaaaatacacatgaaaactatgttggatgatgataagcgacagctacgtttataccaagagaggtaccttgctgatggggatctgcacagcgatggtcctgggcgaatgaggaagtttcgatggaaaaacatagatgatgcttcccagatggacttgttccacagagactctgatgatgatcagactgaagaacagcttgatgagtcagaagccaggtggaggaaggagcgaattgaacgagagcagtggcttcgggacatggcacagcaggggaaaattacagctgaagaagaagaagaaattggggaggacagtcagtttatgatactggccaagaaagttacagccaaagcactgcagaagaatgccagtcgccctatggttattcaggaatcaaagtctttgctcagaaatccttttgaagccatcagaccaggaagtgctcaacaggtgaagacaggctcactgctaaaccagcccaaagctgtgcttcagaaactggctgctctctctgaccataaccccagtgctcctcgaaattcaagaaactttgtctttcatacactttctcctgtcaaggctgaggcggcaaaggaatcgtctaagtctcaggtaaagaaaaggggtccatctttcatgacttctccttcacctaagcacctcaaaacagatgatagcacttcaggattgacgcgaagcatcttcaaatatttggagagctaacaccatcaaaggtgccaaaatctacattgagactgctttgagaagtttctagcactgaaagttggaattgacactccagccaatgatccttccttctttcataatcaatgcaataagattgcagacagaaattccagtgatttctactgcacagctctggacatctcttttcctagtattattccctgaattggccactgatttcaattctgcagtatttacaacatcaacaactcatggaatacttgggtgaggtttcctttttttttttttttttaa

SEQ ID NO: 70 - DNA, 521 bp, Homo Sapiens
agaccgtgtgtttccaaaatggcggcagcgatggatgtggataccccgagcggcaccaacagcggcgcgggcaagaagcgctttgaagtgaaaaagtggaatgcagtagccctctgggcctgggatattgtggttgataactgtgccatctgcaggaaccacattatggatctttgcatagaatgtcaagctaaccaggcgtccgctacttcagaagagtgtactgtcgcatggggagtctgtaaccatgcttttcacttccactgcatctctcgctggctcaaaacacgacaggtgtgtccattggacaacagagagtgggaattccaaaagtatgggcactaggaaaagacttcttccatcaagcttaattgttttgttattcatttaatgactttccctgctgttacctaattacaaattggatggaactgtgtttttttctgctttgttttttcagtttgctgtttctgtagccatattgtattctgtgtcaaataaagtccagttggattctggaa

SEQ ID NO: 71 - DNA, 3857 bp, Homo Sapiens
agtaacgccttctccaagtggatggcggggtggacacgcgtcccggcgccccgggctccctgggatatgtagttcgcgacaggacgagcggaaatactgccaggattttaccacctctcgcccatttatttacttctcggtcaccgctttcgggggacagataaacaccacagatgcccatcaaaggggcgcacgggtctggaggcgcagctcaggtttttgcgttggtcaccctgccctccgcacgtggagagggcaggcataaagcaccttgaaaggaaggtgctgtcaatgctatccgacgacctgtcgccgggcaccgcagcatcctcgctcgctccgatgggacgagggacgccggccccagggtaacaggaggcgcctcgccggccgcgcgctggatgctgtgatccaggtccggagccgggttccgccgcggccgcagcgacccgaccccacccgacaggccagaggaatcagtttagacttgaaattcagtttttcctgaaactgatcagaagttagtgacaccttgattggatccgtttttctgtcaggagctcattttgcagctctcaagcttttatagcatgctgtaaacaattgtcaaagttgtttatcaagaaacagatagagttgcaacttgtttctagtaatagaaacttttacactgcattcaatgcctaacgttgcagaaacagaaaggtcaaatgattctggaaatggtgagcacaaatctgagagaaagtcacctgaagagaatctacaaggtgctgtaaaatctttctgcacaagtgcctcaggagcacccttgggtcccaaaggagatggtcattatccatggagttgtccagtgactcatacacgggaaaaaatttatgccatctgttcggactatgcctttctcaaccaggcgacctcaatctataaaactccaaatccatcccgctctccttgcctccctgatagtacctctttatctgctggaaataattcatcaagatacattggtatcccgactagtacatcggaaattatctacaatgaagaaaatagcttggaaaacttatccaacagcctgggcaagctacctctcgcatgggaaattgataaatctgaatttgatggggtgaccacaaattcgaaacacaaatcaggcaatgcaaagaaacaagtttccaagagaaaaacttcagataaaaagggaagatatcagaaggaatgtcctcagcattctcctcttgaagatattaaacagcggaaagtattagacctcagacgatggtactgcataagccgaccacagtataagacttcttgtggcatctcttcattaatttcttgttggaatttcttatacagcacaatgggagctggaaaccttccacctattacccaagaagaagctttacatattctgggctttcaacctccatttgaagatattaggtttggtcctttcacggggaatacaacacttatgaggtggtttagacaaattaatgaccacttccatgtaaaaggatgctcttatgttctatataagcctcatgggaagaataaaacagcaggagaaactgcttcaggggccctgtcaaagttaacccgtggattgaaagatgaatcgctggcttatatctatcattgccaaaatcattatttttgtccaattggcttcgaagcaacccctgttaaagctaataaagcattcagcaggggacctctctcaccacaggaagttgaatattggatcttaattggagaatcaagtagaaaacatcctgccattcactgtaaaaaatgggcagatattgttactgatctaaacactcaaaatccagaatacctggatatccggcacttagagaggggactgcagtatagaaaaacaaagaaggttgggggaaatttgcattgcatcatagcattccagagacttaactggcaaagatttggcctttggaactttccatttggaaccattagacaagaatcacaacctccaacacatgcccagggaattgccaaatctgagagtgaagacaatatttccaagaagcagcatgggcgtctgggccggtctttcagtgctagtttccatcaggactcggcatggaaaaagatgtctagtatccatgagagaaggaacagtggttaccagggttacagtgattacgatgggaatgattgactatgcttgctactgaacagctggcattatatatgaaactgctatatacaggactgtataaagacagtagaagattttagtaagcctacattaaataggagcagatcttgtggtataaaaaataaccttgtagttctccagatactaagcttgtatatgattatggtgggtgatttcagatatataagcagataagcacagattattgtcctttcaagttaagagtatataatctggacagaaaatttcacaaaattcaataaaattacaactgttgtctaaataagtgaaacacaaattcacttaatagcatcaagatttgaaatacttaagcatgaagtgacttttataatgactcgatccctagacatttgttacagatagttttatgcctaagaccaagatgtaaagtaccatctgcccttaaaaaaaattggggctgtcaatttctagttttcactcatggttaacacgcatttaaaattatttcatgagtctagtagttctttgatttatagcaggatcttgcttgcctcatttgtttcctggttatgttcttaggattctgactaagaggcaaaagagaaaagactcaagaaactgatcctggagatcgagaccatcctggctaacatggtgaaaccccgtctctactaaacatacaaaaaattagccgggtgtagtggtgggcacctgtagtcctagctactcgagaggctgaggcaggagaatggcgtgaacccgggaggtggagcttgcagtgagcggagatcgcgccactgcactccagcctgggcgacagggcaagactctgtctcaaaaaaaaaaaaaaaaaaaaagacggatccttttttttggtgcaaatgggtgacttagtgcattgattcagatttttaaaatttcttgatgtggtttgtaataatcaaatattgacaagaaccttaggtctcgaaagacttttataagtctagatgacgtttgccttaggggtaaagtaaaagaacaattggcaccttaagtttctatacccaaggttatctgtgaaatgagatctcctgatatttgattgctttctcagtatggagtcatatgttgataacagtactgaagatgcataagaaatgcccaagtcactcagaggacaactacccatattccagactctgagctgtttcctttttaaaaatcatatagacaattagctgtttgaagtgagtattaaatatttcagaagtgtgaatttcatgtatttgagctcctctagttgctgttggtttttcttctgctgccaacctgtgactcacaaatgactaggatctcttgttctttaattttagggtcttgttccaggactcaaatcagtaacttggtgattacaaggtgctgaatgtgttggtaaccatatcgcaatacacctcaaggaaaaggttcagatttttatttttaaaatattttcatttttttcttgaattttatatccgtttgttcactcgtacatgcctagcctacagaaggggatatatattatgaaatggtcatttttctgaagagaatattttgcttgaaatgcaaaggactgaaagagatttgtaggttgttgattttgttacttcatactggaacttttaaaaagatttcatcaaataaagttttgttttctactttt

SEQ ID NO: 72 - DNA, 3315 bp, Homo Sapiens
gaccttccattttggtagcttcaactttgcagctgctgtgtctcttcgtcgtctgggaagaaaactttcacattaagagttgctgatgcggattttctttctttcctctcccggcgttgatgagtgcttggctcctgacagaagggatttggctcccagctttgtagttcggaagaagttgggtctatagatttccccctaactctccattgatgtgttgagcttcagagggaataataactctacgtaaagcatgctggcgtctcaaggagttctcctgcatccttatggcgtgcctatgattgtaccggcagctccttaccttcctggactgattcagggtaatcaggaagcagccgctgcccctgacacaatggctcagccttacgcttcggcccagtttgctcccccgcagaacggtatccccgcggaatacacggcccctcatccccaccccgcgccagagtacacaggccagaccacggttcccgagcacacattaaacctgtaccctcccgcccagacgcactccgagcagagcccggcggacacgagcgctcagaccgtctctggcaccgccacacagacagatgacgcagcaccgacggatggccagccccagacacaaccttctgaaaacacggaaaacaagtctcagcccaagcggctgcatgtctccaatatccccttcaggttccgggatccggacctcagacaaatgtttggtcaatttggtaaaatcttagatgttgaaattatttttaatgagcgaggctcaaagggatttggtttcgtaactttcgaaaatagtgccgatgcggacagggcgagggagaaattacacggcaccgtggtagagggccgtaaaatcgaggtaaataatgccacagcacgtgtaatgacaaataaaaagaccgtcaacccttatacaaatggctggaaattgaatccagttgtgggtgcagtctacagtcccgaattctatgcaggcacggtcctgttgtgccaggccaaccaggagggatcttccatgtacagtgcccccagttcacttgtatatacttctgcaatgccaggcttcccgtatccagcagccaccgccgcggccgcctaccgaggggcgcacctgcgaggccgcggtcgcaccgtgtacaacaccttcagggccgcggcgcccccgcccccgatcccggcctacggcggagtagtgtatcaagagcctgtgtatggcaataaattgctgcagggtggttatgctgcataccgctacgcccagcctacccctgccactgccgctgcctacagtgacagaaatcagttcgtcttcgttgcagcagatgaaatttcttgtaacacctctgcagttacggacgagtttatgctgccgacccctaccaccacgcacttgctccagcccccacctacggcgttggtgccatgaatgcttttgcacctttgactgatgccaagactaggagccatgctgatgatgtgggtctcgttctttcttcattgcaggctagtatataccgagggggatacaaccgttttgctccatactaaatgacaaaaccataaaaaccttccaatgtggggagaaaggaagctttccgaggcctgagtattgcaatacatgcagtagtacatcattttagcaactctaaaaaaaaaaaaaatacaaataaaaaggaaaaaaaatgacattttttatcttatacctcagatattttgttctgtgtattttaatattgtgggtctttaatttctgaaggttccgtagtttggttgctggctgtaggagtttttgtggttgatctagacagatgctagataatgaataaaaactggtttagggccatatccagagtgctatattatgtaaatgaattatatatgctgaatattaagctactggggttatcagctgtttgggaagagtgtaagtgactacagtagtcatttttttctgcacctgcattattttattttgtgaaaggggaggttgggaggggcttaggggattggaactggggtttggctgaaagaaaaaaaaaaaaatgtaactgatgaatctaaacgacccactgcaccaacaatcatttatcaatggttctaagttactcattgccagttcaagccaaaggtcatgttgttaagggggtgcttctagtagcacttgtgcatctgagttgaatgaagctgtgcaaacccaccctttaaaccattccacccggcagtattcagcttcttaaccagtcgctatttaggaaaaaaaacccactagttaggccatcaacaagcattctttttatatttcttccagtataataaattattgatatcactgctgacttttatattatgggagggaaaaaataacattaataaaaaggtgataaaaaagcactgtttctatttttttctttttttccaaaaaaagaaagtaataaaaacttaaattctttgtaccagttaaaaaaaatgtataaaatttacatctgtgcagtggagttgttaagttctagaaacagtctatgaagctttagttttagcctagtagaacaactgttagagacagacgtataatttttatggaattacatgataatcatattcggatttatagaagcattttacaagtattgcaatcattgagtagagataatcatggtattttcatcagcttggtactttttgaaacgtgactgcgttgtgtgaacaatctgcaatttttcagtccgtgagatcctgcccttccacctctttcccatacccccaaggattatctcaaaatgatctctttagttctgtctccaaggcccaggacacttgtcagaaggatgcaaaaaaagaaaaaagtacatccaccctcttaatcccaaaagaacaaagtctccccacctttctcggatgcagggccagagtgacacagccgaaaaattgcagtttgtctgtacttctgtttgaactttccacgttgtcctgtttacaagttaacttaagttggggtatccgtcacgggtcttcctgttttgtatttaaataaaaacaacagcagcaggctgtccctgagtagttttgctgccataggttaagtcctcatgtgtacagtgcaggccctgtggcccgcacttcagtaagttatcaactctcaccgctgtgaacctgccaatccgctgtaacaactctgctttaaaacaaaaccaaacaaaactttaaaaaaaaatgtgtgatccagctttctcttgccatcctatgtgcatgccgtaagatcagttggatattaaaccatcaataaagtttcacaagatttga

SEQ ID NO: 73 - DNA, 2698 bp, Homo Sapiens
atgctcctggacgcgggtccgcagttcccggccatcggggtgggcagcttcgcgcgccaccatcaccactccgccgcggcggcggcggcggctgccgccgagatgcaggaccgtgaactgagcctggcggcggcgcagaacggcttcgttgactccgccgccgcgcacatgggagccttcaagctcaacccgggcgcgcacgagctgtccccgggccagagctcggcgttcacgtcgcagggccccggcgcctaccccggctccgctgcggctgccgctgcggccgcagcgctcgggccccacgccgcgcacgttggctcctactctgggccgcccttcaactccacccgggacttcctgttccgcagccgcggcttcggggactcggcgccgggcggcgggcagcacgggctgttcgggccgggcgcgggcggcctgcaccacgcgcactcggacgcgcagggccacctcctcttcccgggcctgccagagcagcacgggccgcacggctcgcagaatgtgctcaacgggcagatgcgcctcgggctgcccggcgaggtgttcgggcgctcggagcaataccgccaggtggccagcccgcggaccgacccctactcggcggcgcaactccacaaccagtacggccccatgaatatgaacatgggtatgaacatggcagcagccgcggcccaccaccaccaccaccaccaccaccaccccggtgcctttttccgctatatgcggcagcagtgcatcaagcaggagctaatctgcaagtggatcgaccccgagcaactgagcaatcccaagaagagctgcaacaaaactttcagcaccatgcacgagctggtgacacacgtctcggtggagcacgtcggcggcccggagcagagcaaccacgtctgcttctgggaggagtgtccgcgcgagggcaagcccttcaaggccaaatacaaactggtcaaccacatccgcgtgcacacaggcgagaaacccttcccctgccccttcccgggctgtggcaaagtcttcgcgcgctccgagaacctcaagatccacaaaaggacccacacaggggagaagccgttccagtgtgagtttgagggctgcgaccggcgcttcgccaacagcagcgacaggaagaagcacatgcacgtccacacctccgataagccctatctctgcaagatgtgcgacaagtcctacacgcaccccagctcgctgcggaagcacatgaaggtccatgagtcctccccgcagggctctgaatcctccccggccgccagctccggctatgagtcgtccacgcccccggggctggtgtcccccagcgccgagccccagagcagctccaacctgtccccagcggcggcggcagcggcggcggcggctgcggcggcggcggccgcggtgtccgcggtgcaccggggcggaggctcgggcagtggcggcgcgggaggcggctcaggcggcggcagcggcagtggcgggggcggcggcggggcgggcggcgggggcggcggcagctctggcgggggcagcgggacagccgggggtcacagcggcctctcctccaacttcaatgaatggtacgtgtgacgggtcggggcctctctccctctccctgtccccaccccagcgcagcagccctccccgcagctagcagcgagggcaccttgtgatcatgttgttaaaattatgaatctgatttttatgatgatgaaaattttaccagcagaaggattttttaaagttttttttttttttttaataataatctaggcatgaagagcaaaaatatcccttccggagtctttgaagctgaaaatataaaacaaataaaaaataaaaaaataaaaacccacaaaaatgttgaaccaaacctccctgctaatctccatgcccacgttctttcccaccctgttcccagtcttctgacaaactgtgtacatagcggactcctcctttctcctccgaggtggttttaaaggctttttggtgtatagaagtttgtccatttgtaaaactccggattgcgttcctccccgccttccgccccttcccttccctaaagtgatgggctttctcttttctctttttagtttacccggtttctttttaagtaatgtggaagaaaatggtttattttgtattgtggtattgaatattgtgttcctttttatgaggcaacctgattgtaaacttcatgtaactatagactggaaaaaatgagccgtgccaaagtctcccttctgtttcttcagcacattgacccatagcacacacatacacaccaccaccaacaacgcttgtgaatgtatttttctgttagctgggtttacatgtgatgttttagtgcttttgcaagttcaatttgttagttcctgtatgaaagattgtgggggaaaaataaacgtcgtgccgttagctttttccgtaataacacccttccttctgtaaatacccgttaccatatttatccatttgtaattaaattatggtattaacttgctacagaggaaacaatatttataaagaatgtttcttaactataaatatgtacaattgtgggcataaactgtttcagattttttatttgaaggttttaagtggtttgatcatttcttgtgatgttttgagagtaatgcatacagaaatataataaaatgtgttgaaactgcaaaaaaaaaaaaaaaaa

SEQ ID NO: 74 - DNA, 971 bp, Homo Sapiens
cctggggctgctgttcctgtggtaatgtggcagctgggaccatggccagcttcagtctgcctggcgtcacataagccagcccacagggtcctgcagcttgtcctttctggctggaagctctgggcatagcctgggactgggtctttccagagagggctgcagccagggccctgccagcctcgggggccacagcggctctcacaccagcatcttgctggataggagcagttccaggactctctgatcacacctgatcatcgtcactgccagaattcaaggtagctgcctgccatggctgagaggtgtgcctcagcttaacccactcagtgatggactccagtgcctgcaagaagtctcaccagagtaagaagtggaggatccaggcccaggagaattttgccaagaagtttccgtacaggttgtcgtggctgacagagcccgaccctgagcccctgcagccctgggaggtcacaaacgactcgaacacggtgcagctgcccctgcagaagaggttggtgccaacgaggtccatcccagtccgagggctcggggctccagattttacatcaccgtctggctcctgcccggcaccactaccagcaccatcaccacctccactgtgcaacctttgggaactcaagttgctgagtcgccgcttccccagacaactcgccttcctgctgtccacccggcacactgaggctgcctgcccccagaccagcaaggcggcagggctgtccaggggcctctcctagagactgggctctgtgtgtggccttcttattggccaccttctccttggcaggctctgggcagtagccacagagactttagtaaagggatcagccttcatggccatcatagaccgggagtggtttgtggtccccccaaaaagctacaccaagctaataaactgcgagttcccaccccacttccagctggaatgaaaaaaaaaaaaaaaaaaaaaaaaa

SEQ ID NO: 75 - DNA, 1547 bp, Homo Sapiens
gctggatttaaggttgccgctagccgcctgggaatttaagggacccacactaccttcccgaagttgaaggcaagcggtgattgtttgtagacggcgctttgtcatgggacctgtgcggttgggaatattgcttttcctttttttggccgtgcacgaggcttgggctgggatgttgaaggaggaggacgatgacacagaacgcttgcccagcaaatgcgaagtgtgtaagctgctgagcacagagctacaggcggaactgagtcgcaccggtcgatctcgagaggtgctggagctggggcaggtgctggatacaggcaagaggaagagacacgtgccttacagcgtttcagagacaaggctggaagaggccttagagaatttatgtgagcggatcctggactatagtgttcacgctgagcgcaagggctcactgagatatgccaagggtcagagtcagaccatggcaacactgaaaggcctagtgcagaagggggtgaaggtggatctggggatccctctggagctttgggatgagcccagcgtggaggtcacatacctcaagaagcagtgtgagaccatgttggaggagtttgaagacattgtgggagactggtacttccaccatcaggagcagcccctacaaaattttctctgtgaaggtcatgtgctcccagctgctgaaactgcatgtctacaggaaacttggactggaaaggagatcacagatggggaagagaaaacagaaggggaggaagagcaggaggaggaggaggaagaggaggaagaggaagggggagacaagatgaccaagacaggaagccaccccaaacttgaccgagaagatctttgacccttgcctttgagcccccaggaggggaagggatcatggagagccctctaaagcctgcactctccctgctccacagctttcagggtgtgtttatgagtgactccacccaagcttgtagctgttctctcccatctaacctcaggcaagatcctggtgaaacagcatgacatggcttctggggtggagggtgggggtggaggtcctgctcctagagatgaactctatccagccccttaattggcaggtgtatgtgctgacagtactgaaagctttcctctttaactgatcccacccccacccaaaagtcagcagtggcactggagctgtgggctttggggaagtcacttagctccttaaggtctgtttttagacccttccaaggaagaggccagaacggacattctctgcgatctatatacattgcctgtatccaggaggctacacaccagcaaaccgtgaaggagaatgggacactgggtcatggcctggagttgctgataatttaggtgggatagatacttggtctacttaagctcaatgtaacccagagcccaccatatagttttataggtgctcaattttctatatcgctattaaacttttttctttttttctaaaaaaaaaaaaaaaaaaaaaaaaaaaaaaaaaaaaaaaaaaaaaaaaaaaaaaaaaaaaaaaaaaaaaaaaaaaaaaaaaa

SEQ ID NO: 76 - DNA, 2020 bp, Homo Sapiens
gaactagtggcgggctgaggacgccgtacccctcggaaggcagccctgcggtccctttgccgcccgttccctcccggacatggaggacgtggaggcgcgcttcgcccacctcttgcagcccatccgcgacctcaccaagaactgggaggtggacgtggcggcccagctgggcgagtatctggaggagctggatcagatctgcatttcttttgacgaaggcaagaccacaatgaacttcattgaggcagcgttgttgatccagggctctgcctgcgtctacagtaagaaggtggaatacctctactcactcgtctaccaggcccttgatttcatctctggaaagaggcgggccaagcagctctcttcggtgcaggaggacagggccaatggggttgccagctccggggtcccccaggaggcagagaatgagttcctgtcgctggatgacttccctgactcccggactaacgtggatctcaagaatgatcagacgcccagtgaggtcctcatcatccccctcctgcccatggccctggtggcccctgatgaaatggagaagaacaacaatcccctgtacagccgtcagggtgaggtcctggccagccggaaggatttcaggatgaacacgtgcgttccccaccccagaggggccttcatgttggagccagagggcatgtcccccatggaaccagcgggcgtttcccccatgccagggacccagaaggacaccgggaggactgaggagcagccaatggaagtttccgtgtgcaggagccctgtcccagcactcggcttctcccaggagccaggcccctctccagaaggcccgatgcccctgggtgggggcgaggacgaggatgcagaggaggcagtagagcttcctgaggcctcggcccccaaggccgctctggagcccaaggagtccaggagcccgcagcagagtgctgccctgcccaggaggtacatgctgcgggagcgggagggggccccagagcctgcatcctgcgtgaaggagactccagacccctggcagagcctggacccctttgactccttggagtctaagcccttcaagaaaggtaggccttactctgtgcccccctgtgtggaggaggctctgggacagaagcgcaagaggaagggcgctgccaagctgcaggacttccaccagtggtacctggctgcctatgcagaccatgccgacagcaggcggcttcggcgaaagggtccgtcctttgcagacatggaggtcctgtactggacacacgtgaaggagcagttggaaactctccggaagctgcagaggagggaggtggctgagcagtggctgcggcctgcagaggaggaccacctggaggattccctggaagacctgggggcagcagatgactttctagagcctgaggagtacatggagcccgagggagcagaccccagggaagccgctgaccttgacgcagtgccgatgtccctgagctacgaggagctggttcgaaggaatgtggagctcttcatcgccacctcccagaagtttgtccaggagacagagctgagccagcgcatcagggactgggaggacacagtgcagcctctgctccaggagcaggagcagcatgtgccctttgacatccacacctatggggaccagctggtctcacggttcccccagctcaatgagtggtgtccctttgcggagctggtggctggccagccggccttcgaggtgtgtcgttccatgctggcctccctgcagctggccaatgactacacagtggagataacccagcagcccgggctggagatggccgtggacaccatgtccctgagactgctcacgcaccagcgagcgcacaagcgcttccagacctacgctgccccctccatggcccagccctgagtggggagcaccgaggcaggggtgggggaatgtgtactgaggagccgtgcgtctgctcctggctggcccggcctaataaagcagtgttgccatctcaaaaaaaaaaaaaaaaaaaaaaaaaaa

SEQ ID NO: 77 - DNA, 4206 bp, Homo Sapiens
tcagtcttatacttccacttaagtcttctcgccggatgctttttcctccttgcttttgccggaaaggagagagatacatgtgaaggatatctgtcctcgttgcttcccctgccctctcaaaagtttaacttctgtgggaatgtgtatcttccttttctggaccatttgacagtcccgccccagccgccgtgtgatttagcaaccggtatcatattcagatcaaatcttaaaaaaaaaaagtcacctacagaactacagaattgttctctcccgctcaagaagggcaagtggactttggcgttaagatgcaggggggtgaaccagtgtccacaatgaaagtctcggagagcgaaggaaagctggagggccaggccacagcggtgaccccgaacaagaacagcagctgtggaggtggaatcagtagcagcagcagcagccgcggtggcagtgcaaaaggctggcagtacagtgatcacatggaaaatgtgtatggctatttaatgaagtataccaaccttgtcactgggtggcagtacaggttttttgttttaaacaatgaagctgggctgttggagtactttgtgaatgaacagtctagaaatcagaaacctagaggaactttgcagcttgcaggagctgtaatatcacccagtgatgaggattctcacaccttcactgtaaacgctgccagtggggaacaatataaactcagagctacagatgcaaaagagcgacagcactgggttagcagacttcagatatgtacacagcatcatactgaagctattggaaagaataatcctcctctgaagtcacggagcttctcacttgcatctagtagtaattctcctatatcgcagaggagaccaagtcaaaatgccatttctttttttaatgttggacattccaaactgcaatcactgagcaaaagaactaatttacctccagaccatcttgtggaagtcagagaaatgatgtctcatgctgaaggacaacaaagagacttaattagacgaattgaatgccttcctacttctggccatcttagttccttggaccaggatctcttaatgctcaaagctacttccatggcaactatgaactgcttaaatgactgctttcatattctccagttacagcatgcatcacatcagaagggctcattgccttcaggaacgacaatcgagtggttagaaccaaagatatctttatcaaaccactataaaaatggagctgaccagccctttgcaactgatcagagtaagccggtggcagtcccagaagagcagcctgttgcagaatctggactattagcgagggagcctgaagaaataaatgcagatgatgagatagaggatacatgtgaccacaaagaggatgacctgggagctgtagaagaacaacgtagtgtcatcctacatctcttgtcacagcttaagctgggcatggatttaacaagagtggtgcttcctacatttatcctagagaagcgttccttgctggaaatgtatgcagactttatgtctcatccagacctatttatagccatcactaatggagccacagctgaggacagaatgattcgctttgttgagtactaccttacctcatttcatgaaggccgtaagggagccattgctaaaaaaccatacaatcctatcattggagaaacatttcactgttcctggaagatgccaaaaagcgaggtagcatccagtgtttttagcagttcttccacccagggagtcacaaatcatgctcctttatcgggggagtctttgacccaggtgggatcagactgttacacagtcagatttgttgctgagcaggtttctcatcatcctccagtctcaggattttatgcagaatgtacagagaggaagatgtgtgtaaatgcgcatgtctggactaagagcaagttcttaggcatgtcaataggcgtgacaatggttggagaaggtatccttagtctgttggagcatggagaagagtacacattttctctaccctgtgcatatgctcggtcaattttgactgttccttgggtagaactgggtggcaaagtcagtgtcaactgtgcaaaaactggatattcagccagcatcacttttcataccaagccattttatggtggcaaactgcatcgggttacagctgaagtaaagcacaacatcaccaacactgtggtatgcagagtgcaaggggaatggaatagtgttcttgagttcacatatagcaatggagagacaaagtatgtggacttgactaaattggcagtgacgaagaaaagagtgagacctctggagaagcaggatccatttgaatccaggcgattgtggaaaaatgtgacagactcgctgagagaatctgaaattgataaggccacagagcataagcataccctggaagaacgtcagaggactgaagaaaggcatcgtactgaaacaggcacaccttggaaaaccaaatattttattaaagagggagatggctgggtttatcataaaccactttggaaaataattccaacaacacaaccagcagagtgacacatactatctaaaactcgaccaaatgaggttcttctctgtttaccctaaatcctcccagaatggagtcattgcactgagtgacctgcttcctgattgcgcagactgaaactagctaaacctgaatgtacctactagggcaccataatactgcagcaagaccaaagtggtaaagaaacacagtggaccttttaccaacctgttcatgtgatgtgagcaataccatcttaaaacttgttacctgaatcagtagatgaatcttttatccagttcttgctcctaaagttaagtttgaatcccctatttttgcacaggggcagcagatacacacaacaatgagaactcagtgactttgatttctttgtagtgaaaagtgaagtctccgtttcagagtttgtgtctttctttctgtccataactgaagtattcactactcttgtaaaccaaccaagaggaggagaaagatgacccagaagtggattcagccattgtgcctgaaatcagtgtttaaaaaaaaaaatcaaccaggttgtggtaacaaggcattctatttcttcaaaaagactgtatgcctgtgtctgaggaacttacctattatccacctctgttggaactctcttttaaaaagtacatttatagattgatcagaattataaccatggagaattttttcttctgagcattttaatatacttgaaaacaacattgacttgaaaaatttcagaacatttttcagtacctagttttattaaatattacacttgagagacactttttaaaaatgtgttaatgtcaatatgatgagattttagcctttctccagaactaaggcattaaagaaaatagcaaatattaaaaaataaaactgttacttttttccttctttcttttcacctttaggttaatatccagtattatgtgttatccctttggataagtatgctttattttacctctgttaaaaattaaaataaatgattctattcatatttgtcagtaattcaaaacttatatgtgtaactgaacgcgcatgtaaggtatggttttatttattttttttttttttgaggaaatttaaatgctaaagaaacaacgaaatgaaaaggtatcaggaaaaaaagatcaggaagttgtattcaggtacaaatctttttttaaataagtattttgttgaggttgaagaattgctggcaattaaaagaatagagctaattatggctttcatcattcattcatgtatttattgagcacctacttattatggtgctcaacacttgttactgcaagctaccttaatttcccaagagtggtgccttactctgttttttctgatatggtcttccaatcagtgtgtgtaacatacctgttgtttatcagccattgtaggtggctgtgtctgttgcatcatcataagaagtttaagctttgtgctctgataaattgtgttctgttaaagaggttagtaggatgaaaacagcaaaacaataattttttcaacaaattgtaaattataagaaaaagagttggtttgtgtacaacaattttaatgattcccttgttcatttttgctgtgaaatgcactgaaaaaaatcctcaaaatgagttatagttcctgtgttgggaaaattgacaaataataaaactagagaacaaacaa

SEQ ID NO: 78 - DNA, 1695 bp, Homo Sapiens
gcgggacggaagagggggtgaaggccagaggctcggggcttcaagaccgctgtctggagtccccctttccaggccatgtcggggcccacctggctgcccccgaagcagccggagcccgccagagcccctcaggggagggcgatcccccgcggcaccccggggccaccaccggcccacggagcagcactccagccccaccccagggtcaatttttgcccccttccatctgagcagtgttaccaggccccagggggaccggaggatcgggggccggcgtgggtggggtcccatggagtactccagcacacgcaggggctccctgcagacagggggggccttcgccctggaagcctggacgccgagatagacttgctgagcagcacgctggccgagctgaatgggggtcggggtcatgcgtcacggcgaccagaccgacaggcatatgagcccccgccacctcctgcctaccgcacgggctccctgaagccaaatccagcctcgccgctcccagcgtctccctatgggggccccactccagcctcttacactaccgccagcaccccggctggcccagccttccccgtgcaagtgaaggtggcacagccagtgaggggctgcggcccacccaggcggggagcctctcaggcctctgggcccctcccgggcccccactttcctctcccaggccgaggtgaagtctgggggcctggctataggagccagagagagccagggccaggggccaaagaggaagctgctggggtctctggccctgcaggaagaggaagaggaggcgagcacgggccccaggtgcccctgagccagcctccagaggatgagctggataggctgacgaagaagctggttcacgacatgaaccacccgcccagcggggagtactttggccagtgtggtggctgcggagaagatgtggttggggatggggctggggttgtggcctttgatcgcgtctttcacgtgggctgctttgtatgttctacatgccgggcccagcttcgcggccagcatttctacgccgtggagaggagggcatattgcgagggctgctacgtggccaccctggagaaatgtgccacgtgctcccagcccatcctggaccggatcctgcgggctatggggaaggcctaccaccctggctgcttcacctgcgtggtgtgtcaccgcggcctcgacggcatccccttcacagtggatgctacgagccagatccactgcattgaggactttcacaggaagtttgccccaagatgctcagtgtgcggtggggccataatgcctgagccaggtcaggaggagactgtgagaattgttgctctggatcgaagttttcacattggctgttacaagtgcgaggagtgtgggctgctgctctcctctgagggcgagtgtcagggctgctacccgctggatgggcacatcttgtgcaaggcctgcagcgcctggcgcatccaggagctctcagccaccgtcaccactgactgctgagtcttcctagaagtacctgctgggttctcagttccagttcccatcctttgattgatcactctccctgacatccacctgtatgactttgtcaccaaatgctgtcttctctttctccaatcaagaaataataatccctcgagtttacaaaacaaaaaaaaaaaaaaaaaaaaaaaaaaaaaaaaaaaaaaa

SEQ ID NO: 79 - DNA, 2009 bp, Homo Sapiens
atgtggctcacataaattcagaaagtatgatagcagtgtaggtggttagcagcacctcataaggtccttcctagcaaggcaaagggatgctaatgactagccaatgctctaggaagacattgagaccagccaacttcttgccttgataactactgaagagacattgggtggctggattttgaaagcagacttctggttataggtgatgcaacttgaaaaacaatcctgaaacatgaaacaagaataataatatttaaatgtaacttaatcattatacctctttatccatcaaagtgaattcattccattccctttcatctgtgctcatactttgcatcagatattgggtaaaccaaagtgtgtaggaagaaataaatgttttcatagtcattactctttacaatgggagtgctaaaattcaagcacatctttttcagaagctttgttaaatcaagtggagtatcccagatagttttcaccttccttctgattccatgttgcttgactctgaatttcagagcacctcctgttattccaaatgtgcctttcctctgggcctggaatgccccaagtgaattttgtcttggaaaatttgatgagccactagatatgagcctcttctctttcataggaagcccccgaataaacgccaccgggcaaggtgttacaatattttatgttgatagacttggctactatccttacatagattcaatcacaggagtaactgtgaatggaggaatcccccagaagatttccttacaagaccatctggacaaagctaagaaagacattacattttatatgccagtagacaatttgggaatggctgttattgactgggaagaatggagacccacttgggcaagaaactggaaacctaaagatgtttacaagaataggtctattgaattggttcagcaacaaaatgtacaacttagtctcacagaggccactgagaaagcaaaacaagaatttgaaaaggcagggaaggatttcctggtagagactataaaattgggaaaattacttcggccaaatcacttgtggggttattatctttttccggattgttacaaccatcactataagaaacccggttacaatggaagttgcttcaatgtagaaataaaaagaaatgatgatctcagctggttgtggaatgaaagcactgctctttacccatccatttatttgaacactcagcagtctcctgtagctgctacactctatgtgcgcaatcgagttcgggaagccatcagagtttccaaaatacctgatgcaaaaagtccacttccggtttttgcatatacccgcatagtttttactgatcaagttttgaaattcctttctcaagatgaacttgtgtatacatttggcgaaactgttgctctgggtgcttctggaattgtaatatggggaaccctcagtataatgcgaagtatgaaatcttgcttgctcctagacaattacatggagactatactgaatccttacataatcaacgtcacactagcagccaaaatgtgtagccaagtgctttgccaggagcaaggagtgtgtataaggaaaaactggaattcaagtgactatcttcacctcaacccagataattttgctattcaacttgagaaaggtggaaagttcacagtacgtggaaaaccgacacttgaagacctggagcaattttctgaaaaattttattgcagctgttatagcaccttgagttgtaaggagaaagctgatgtaaaagacactgatgctgttgatgtgtgtattgctgatggtgtctgtatagatgcttttctaaaacctcccatggagacagaagaacctcaaattttctacaatgcttcaccctccacactatctgccacaatgttcattgttagtattttgtttcttatcatttcttctgtagcgagtttgtaattgcgcaggttagctgaaatgaacaatatgtccatcttaaagtgtgctttttcgactaattaaatctttgaaaagaa

SEQ ID NO: 80 - DNA, 4869 bp, Homo Sapiens
agcggtgcacaagaagagaccgaggcgggtggccccgagagagccagggccatggaggccaacatgccgaagcggaaggagcctggcaggtctctccgcatcaaagtcatctccatgggcaacgccgaagtggggaaaagctgtattataaagcgatactgtgagaaaagattcgtgtctaaatacctggcaacaattggaattgactatggagtcacaaaggtacacgtcagagacagagaaatcaaagttaacatctttgatatggctggacatcccttcttctatgaggttcgaaatgagttttacaaggacacacagggtgtgatactggtctatgatgttgggcagaaagactcctttgacgcccttgatgcgtggctggcagaaatgaagcaagagcttggacctcatggaaacatggaaaatattatatttgtagtttgtgccaacaagattgattgtaccaaacatcgctgtgtagatgaaagtgaaggacgtctttgggctgaaagcaaagggttcctgtactttgaaacttcagcacaaactggagaaggcattaatgagatgttccagaccttttatatatccatagttgatttatgtgaaaatggcgggaaacgccctaccaccaatagcagtgctagtttcaccaaagaacaagcagatgccattcgcagaattcgaaatagtaaagacagttgggacatgctgggagtcaaacctggggcctcaagggatgaagtcaataaagcgtatcggaaacttgctgtgcttcttcaccctgacaaatgtgtagcacctggcagtgaagatgccttcaaagcagttgtgaatgctcggacagccctcctgaaaaacatcaagtagaaagtacagaaaaaagccacatgtgggactcaaatgcaaacagactttccctagaggtgaaataaccaacgtggagttttccttcccagaatctcactgctcttttcattcatgtgttgtcatttgtatatcagtaattcaggtacccatttcatagacattttactgagaaatgacctgcatttgtatgaagtgaactgagcgtcacaccctgtacttcatttcatatttctagataattctgaatttttttctcattcgtcagctctgtaattatagtatcacttagacatttcacttggggaaatccacaaggttcctggaggagggaagagaggacaagaggaccctttcactttttcttttttacggaattcatcatcagagaagaaaataacaaaaatggaagcaaacaacatcagaacccctgtaagtttggtgtgaccttacagacaagttgctgcttttacaatgagttccttaggtggtattttaacccatcgatctataatgatgactcttggcagccctttgggagtttgtaaaatgaggtgatacagttctgaattgagcattcctttatgatattcactctgttcctcttctgcagccaccagtgggagagacaagccagtcctaagagaaaaggtggtggcagccacaaattctaggtacactggctgctgcctatcctgtccctggatctgaggcctttcccttgccatagaaatggttgctggtagcagtagagagcactgtgcacctgggaatgaggaatcaggccccaagacagaagtacttggaggagccagctgcagtagtatccgcctgtagtcccagctactcaggaggctgagacaggaggattgcttaagcccaggagctcaagtcccacctgggcaacatagtaagatcttgtctcttaaagaaaaaaaaaaaaggtacttagaggtcgcacttaaagattatgcacatcagcagaggaaaggccagccaagcttggggcaagcttgatgcagtaggagagactccttatgaggcttagcccttgtcttactgccagcctttgccacaggcaggtgagaaaggcagggccactcctcagcaaagttggcctcttctacacttcctcaccagtgttgtttcttccttttttcccctcttccccttcccgtcttgtgttttttctgaaccccacatctgccatcatttctctcctctagagtccctggcttctggccactgcctcctccctcttctaagccttggcctgaatctggttgatcagaggcaagtgtggatcctttgggtggcagtcaggggagatctcagggcctctgttgggaggaatctctgtaattcctgcttgggctccaaatttctgaagagtaatatttttaaactatagcttacaaaatacattctctgaccacagtctcctccttgatatacaagggatggatgaagttcatgtattaggactggcactccttacggtgcttatagaactagtctcacaacttgactcattacgtcgtcattcttgttacatcactcatacttttagctgcaaccacactaattcacatttttatatactttcaattagctgtactaattggggcttgaaagtatataaaatcttcctgtcctgtgaattttaaaaagctatcccatatcgattgccaaagagcatctaccttacctcctaagaagaaaagccactttcttccaatccaagcccactgcagccttgtggattttccacacagcagcttttcactgtatgcctgtacttgggctgcactgagcttgtcttcaggaaaccagagcgttgctttatcatcgcacttttcatcttggtaatatcaaaacaactttttaaatgaactgattgatatatgttatttcttgcgaggttttcctctggcctttaactggcttctgaggctacagaactccaacccagagttcttcgggacctaaattttgcttaaggaaggcctttatcatgctgaaagcactcagacatgtctgtcctcacagcagaatgtagaagtcatatgaatgagggatcgtgcacggtagcgtcagcccgaattgacacgacaactctgaatgtgtggccctctatgaaagctggtgccagttttcatcactgttattaaatactagattgggaacctcattcagccgtattgcacagatgagcaattacagcagagaaaattcattagtgctcccactcatatccttatgtgtgagttggtgaaatttagcctgagcttgattcttaggtcttgagactcagtttccaacaccttcattattaatgttaagaatggccatataccacttcatttacgtaaaaggaataaaataagcaagttaagcttcagggtcctagaatttttctgatttctataatccttcagcagaatattaagaaataaagcatgatctgcaatggaaaggtttttttggcactaacttcatgcagaatttcacagacatctatgcattaatttaaattcgtggtgcaaatgtgtgctttgtagttcaaccttattaaaaattcttcagccagttaggatttcaaaatacattagtgagagtaacagctagcagaataattacaatggctaaaacgtttttatagagaatcttgtttttcaaaaaagaataaaaagtttgaatagctattattaaagaaaagccatgtcttcaacatctgagtcaccaagaagtaacactttttaaacttgttagaaatccctggaggcatttcaaattcatcttctaacctacctaagcactttaaaatacagcctccttctgttcctctgttccccttcatgcctccttttgaattgatatctcagctgtcaatatttctttgacttcagcattgttattttatttctctatatcaatgtgtccttagttttcttagcctgttaatttaaaaatccagacttgggggtcattgtgttgctacccaagagaaaatgctacagttttatagattgcacatcattctttaaggcatacttttacctcaggaaacttactctagtatgttctcatatattgaattctcaactaagtaactatttctttatacctataaactagtacctaattcactgttagttaaatgagctatagataaggcagctaaatttctgaaagatagccagagtaagtaagcagccactgcaagctctgaatcagttttttaaaaaaaagaaaaaaaaaaaaaaggagctgtgccccattgaacaatgacaacatcacaaggggaagggagggattttgccaaaagttagaaaggtggagctgtaagccatgtgcttgttgcctttgacagtgacagtgcgcgtcttacaactaattccactaggcatgggaatgtcacctcctttgccactgtaccccatcaagcttactctgaatcaaaggttttgtaaaacttttgaaaatgaacttagctgcaaaatatagctaaccactttcaattgcaagctttgcaaagtgaagagaggttcgtacttctcataattggtatttagcacaattgtaagatacagttttactgtttgtacatcgtttttttccattaaacttttctagagaagacaaaagcttacactggtgacatggataagtgagatggtgtctaacgagcagtgcaatattaggcggtgcaatagaggccctgttggcaagatgagttttgctggagagctggacagtgttggttagcttcctgcattgattgcccctgggcgttcttcccccttaactgtgaaagcagagtctataaatgaactctttgctcttacaaggtaatttacatattttctttctgttgaaataactgaaaatgttaaatctaccagtttatgtcttgtaaacagagtgtcatatgtatttaagttgtgtatttttataaagtaaagccaagtatcaaacaccggaaaaaaaaaaaaaaaa

SEQ ID NO: 81 - DNA, 1739 bp, Homo Sapiens
ggggatcactgttggaaggcagctgcttgaggtccaaggcagtcagtgtcccctctcttttgcctcgggacagctggtatttatcagactcctaagaagttttccttgctccctagtagaagagagagattatgcagcgggcttttgattgatccaatgggaattacattgatctggtgtctggccttggttcttatcaagtggatcacctctaagaggcgtggagctatttcctatgacagttctgatcagactgcattatacattcgtatgctaggagatgtacgtgtaaggagccgagcaggatttgaatcagaaagaagaggttctcacccatatattgattttcgtattttccactctcaatctgaaattgaagtgtctgtctctgcaaggaatatcagaaggctactaagtttccagcgatatcttagatcttcacgcttttttcgtggtactgcggtttcaaattccctaaacattttagatgatgattataatggacaagccaagtgtatgctggaaaaagttggaaattggaattttgatatctttctatttgatagactaacaaatggaaatagtctagtaagcttaacctttcatttatttagtcttcatggattaattgagtacttccatttagatatgatgaaacttcgtagatttttagttatgattcaagaagattaccacagtcaaaatccttaccataacgcagtccacgctgcggatgttactcaggccatgcactgttacttaaaggaacctaagcttgccaattctgtaactccttgggatatcttgctgagcttaattgcagctgccactcatgatctggatcatccaggtgttaatcaacctttccttattaaaactaaccattacttggcaactttatacaagaatacctcagtactggaaaatcaccactggagatctgcagtgggcttattgagagaatcaggcttattctcacatctgccattagaaagcaggcaacaaatggagacacagataggtgctctgatactagccacagacatcagtcgccagaatgagtatctgtctttgtttaggtcccatttggatagaggtgatttatgcctagaagacaccagacacagacatttggttttacagatggctttgaaatgtgctgatatttgtaacccatgtcggacgtgggaattaagcaagcagtggagtgaaaaagtaacggaggaattcttccatcaaggagatatagaaaaaaaatatcatttgggtgtgagtccactttgcgatcgtcacactgaatctattgccaacatccagattggttttatgacttacctagtggagcctttatttacagaatgggccaggttttccaatacaaggctatcccagacaatgcttggacacgtggggctgaataaagccagctggaagggactgcagagagaacagtcgagcagtgaggacactgatgctgcatttgagttgaactcacagttattacctcaggaaaatcggttatcataacccccagaaccagtgggacaaactgcctcctggaggtttttagaaatgtgaaatggggtcttgaggtgagagaacttaactcttgactgccaaggtttccaagtgagtgatgccagccagcattatttatttccaagatttcctctgttggatcatttgaacccacttgttaattgcaagacccgaacatacagcaatatgaatttggcttt

SEQ ID NO: 82 - DNA, 2975 bp, Homo Sapiens
ggacggacgcactagaggcgacctaaacatggagacagcgggcgctgcaactgggcagccggcctctgggctggaggctccggggtccacgaatgaccggcttttcctggttaaaggtggaattttccttggtaccgttgctgcagcgggaatgctagctggatttattacaacattatcattggctaaaaagaaaagccctgaatggttcaataagggaagtatggccacggctgcattaccggaaagcgggtcttcccttgccttgcgagctctgggctggggctccctgtatgcatggtgtggggttggtgtgattagcttcgcagtctggaaagctttaggagttcacagtatgaacgactttcgaagtaaaatgcaatcaatatttccaacaattcccaagaactccgaatcggctgttgagtgggaggaaacattgaaatccaaatgagatgagcatggatgaatttcaaaatgcttgttacagaaaggggtggctctggagacaccatgacagcaaaaggactgggactgatttctcccaggaacatgggcagattgctgactgaaccagtgcactggatagcattcagcctcatcacaggagagtatgtgtgtgcgtgctgggggagggtaaagttttcccacagttaagaagactatttaaaaatagtaattacaggaataacttccttatgtggaggggaccccataggaaatggttctgtttgtaacagttgaagcaaatttcatactaaaaaagtttataataaaagtatgataagaaaatatttataaaacagaccccctaatagcaatagtactgcaatgtgtctaattaaaggagtttcaagagcctttcttgtcaatatatgacagaacttggaagtcttattctgattagccagactacaaagtgacagtcacctggtaagtcctgtatggtaggaagtgggtgtggctctcgggtcctaaatgtggtctgtgctttacagccatcacacacatgctagttatttacctgatgcccttgcttgaaggccctataaattcttatacttaaaacaaaaagccagtaatgagttgtgatcaccccaaaaggcacagttgggctaaaataatgatatcaggggtaaacatatttttttgagaagttggtctggatctctgaacactgacaatttgtcattttgtctcagttgtcaaagtaaaaaaagcccagttgtcatccgtcttcaatatttttaaccagaaagtcacctgagtacggagtcccaatataaagtatttgggaccacctccctaacaaagctgttagggtaaattctgtgtgcacgcccaactccctcctgtcttccacagtctcctacaaaaaaaacagatggagaataatgtctacatgcaattgtttttactgcaattgtattttaaaatattttcaagaagagaaatactttaatatgtcaatatgtccagagaaaaaacctgtagttaaatatcagttgtgcaatttcttcctacttgcctaggctctaattagtcagcaatcaggtttaataaaggacatttgaaatttctgttatgaaaccttttattctaagggagatttttaaatgaaatgacaagaacttaatgtaatacttttctctagaccatgttaccctgttaaaattgctgtattgttaatgaaacaggtgtaatcagcatctggaattcatatgtaatctgttaaaaatccaagactgaaaggaaaggattgtgaaattggtcagtgaatgcgggtagcaaaaactcttcactgcctttcatttgtaactaaatctcctctgagaagagatctgtaggctttgaatgaaaggaaggaaaggcaggagccaaaggaacaggttttcgtccatacaattagtctgaatctaggttcctctgaatagaatgggcaccgcctgatccttttgtgcttcataaatgtgggtttccaacgtgcatgagatggccctcaaaccttgttacaacgatgcactttactcgtttgatgtggggggaaaaagaatgggcactacctaaaactgtttacagctagaatctgggttttatttttcatagatggagaatgcctagtggtttctaaaggcctccactgggtggagaaaggagacttgcccacctgtctggagtgttaaaaggagaaatcattgttaactgattctgttaatggattcctgccttgtaacctcccgaagggcagggacccctctcagggccttgtaaactggtgtcagcaccgctgcaaaggctgctgcacatcaggctgatggcagctaggccctaggaaggagccaggggccatggtgggggctctgctttcccacagggctggcacagaggaggcctagacatatgttgctgaaagagtgtcctaatactagagtggcatgcctcgtgtctacaaaacccttatatgtcacctctgctgtccttgaccgatggcaggggaactcccattagaatgatgatgaatcccctgcagaggggaggctggcagggacaaattccctaaaagagggaccaagcgtcagctccaattgcatcttaaaagcaaaagtgaagtaatgcacagatggaaatttaaaaagaaaacaagcagtatgactcaagtggtgtttttcacagtcagaacttgaatatcagtagatttcgtcatttgtctattccttttgtaccagaggcatattgttaaattggttaatggaaaggaaaaatgttgaacagataatgttattctttatgagacgtaccatctgtgtattgagctctgaatgtccctggatatggaagagaggaaatgtgatggaatttcaagtttgccttctttgctgtctttatcttgggttgagtatgacaaacataatcacatttatctcctggagcataaagagttttaatccccctaaaaaaaaaaaaaaaaaaaaaaa

SEQ ID NO: 83 - DNA, 3664 bp, Homo Sapiens
cctttttctgcccactctggtaacttattgctctgctgggctctttcccttagggtctctggccctgttcttgccccagcatgacttttatcgggacgccgttgtggaagcctcacgcaggagccctgcccccgtggagaagatcccactggtgactccaaccctaccaccatgaatggggtcctgatcccccatacgcccatcgcagtggacttctggagcctgcgccgggctggcaccgcacgtctcttcttcttgtctcacatgcactcggaccacaccgtgggcctgtctagcacctgggcccggcccctctactgctccccaattacagcccacctcttgcatcgtcacctacaggtatctaagcaatggatccaagccctggaggttggtgagagccatgtattacccctagatgaaattggacaagagaccatgaccgtaaccctcctcgatgccaatcactgtcctggttctgtcatgtttctctttgaaggatattttggaaccatcctctacacaggtgattttcgatacacaccatccatgctaaaggagccagccctgacactggggaaacagatccatactttatacctagacaacaccaattgcaatccagccctggttcttccttcccgacaagaagctgcccaccagattgtccagctcattcgaaaacacccacaacataacataaagattggactctacagcctgggaaaggaatcactgctggagcagctggccctggagtttcagacctgggtggtattgagtcctcggcgcctggagttggtacagctactgggcctggcagatgtgttcacagtggaggagaaggctggccgcatccatgcagtagaccatatggagatctgccattccaacatgctgcgttggaaccagacccaccctacgattgctatccttcccacaagccgaaaaatccacagctcccaccctgatatccacgtcatcccttactctgaccattcctcttactccgagcttcgtgcctttgtcgcagcactgaagccttgccaggtggtgcccattgtaagtcggcggccctgtggaggctttcaggacagtctgagccccaggatctccgtgcccctgattccggactctgtacagcaatacatgagttcttcctctagaaaaccaagccttctctggctgttagaaaggaggctaaagaggccgagaacccaaggtgttgtgtttgaatcccctgaggaaagtgctgatcaatctcaagctgacagagactcaaagaaggccaagaaagagaaactttctccctggcctgcggaccttgaaaagcagccttcccaccatcctttgcggatcaagaagcagttgttcccagatctctatagcaaagaatggaacaaggcagtgcctttctgtgagtctcaaaagagggtgactatgttgacggccccactgggattttcagtgcacttaaggtctacagatgaggagtttatttctcaaaaaaccagggaggaaattggtttagggtcccccttggtacccatgggagatgatgatggaggtccagaagccacagggaatcagagtgcctggatgggccatggttctcccctgtcccacagcagcaagggcacccctcttctagctactgaattcaggggtctagcactcaaatatcttctgactccagtgaactttttccaggcagggtattcttccaggagatttgaccagcaagtggaaaaataccataaaccctgctgaagacaggagagtacagaatgacaacattgagcccacactgcagttttgaagatagtaactgatggctggtgggaaagagtttgtttttggggcctacttttctatctttacaagactcttatgggcccaccgtggagcagcacttcccaaaacttgttcactggggtcctcgtgcctatggaatccttctttttataactaagtttaagaaatactttttttataaaatctttggagtatgcgtgagcaaattaaaagttctttgaagtcctacagtaacttaatctgtttaaccttgtttaacccagtatttctcaaacttttgtgaacatgcaatcatcttatgtgggtacagaaagaggtaaagagtctgaatcaaaaaggaccaggttattgctgttgctgttttgtggtgtcatgagccattctccatgtccccttctccctcttctcagatcaaaatccctagggagttctatttttaaaattatgaactatggcgctgcatgcttcaatcctgaacgtcactgacttgctgtgaccatccaaataattttcctgtctctgcctctgggagggaacaggaagcgatgaagaggtcttggaacagtagtgaaaattctacctctatgtccttcatgaggatgtgcagtatcccagtatcactgggatccatgtggaacagagccagctggggggttgggcagctctctccaaggcagtacctagagcccagctgaacaacaaggctttgggtgtgaagggactccccagcctggagaccctatttggctgaaacagttacaaaatatcaaatgtgttgtcagatattcctccaattgttcacatagctgggatatttgttgctcccctcaccccttggattatgtagggagccagtgcacacagcctgtttgttttagtatccaaggaagagaccaaggagccagctggcgggaaggggtgggggtgtgcagtctgccctgtccttctgctcataacctgacaaaatgccaaactagtaagcaggatagctgataccacggctatgagggagtaggctctgagagggcacagacttgtggagctgggcgtctggatcaaaactgctttgggatggaacctcgagccctagcagtgaagaagattccatttcttgtccaggggatttaaaagagttttctgctttgagagagaaatagagagtttagaaagcaattgctcttgggaaagctatacacagctctgttttgtcaatgacctttgttgtaagtctcccaacgtcctattaggagccacagcaggtgaggcatttggtgcagcaggaaacatggggactgcctaggctcgaatctgtggcaccctgagcaattacttaaattgtggagcctagttcctcatctgtaagatggacttgagattcctacctctcatgattactatggagattgaataattggtaaaattctcctagctcagtgactgccacaggatgggtctttcagattttggttctctttagcttctggttcttgaaagaaattaatctgtatataacataagaaactttgaaagtcaaaaaaacaaaaaattttaattcctcgtagattaattgatttgctatcttttagtttttttttctatgcatgtagatgtattaaatatgtaaatgtttttcaaagttgaggtaatattgtatagaattttatagcctacattttaatttcttgatatcttaagcatttcacttattagatattgttcaaaaatgccatttttaatatttgtataataccctatcatgtgagtataccttaactaagccattcccatattcaacattttgtgtactgtttttctaattacatatattacaatgaaaaaaaaaaaaaaa

SEQ ID NO: 84 - DNA, 861 bp, Homo Sapiens
ccacggcgtccagggcgaccagccgcgggccgcagggcatggaccttcaggccgccggggcccaggcgcagggggccgcggagccgtctcggggcccgccgctgcctagcgcgcggggggcgccccccagcccggaggctggctttgctacagctgaccactccggtcaggagagagagactgagaaggctatggatcgactagcccgtggaacacagagcattcctaatgacagtcctgcccggggtgagggcacccattctgaagaggaaggctttgccatggatgaggaggactctgatggagaactgaatacctgggagctgtcagaagggacaaactgtccacccaaggaacagcctggcgatctttttaatgaggactgggactcggagttgaaagcagatcaagggaatccatatgatgctgacgacatccaggagagcatttctcaagagcttaaaccttgggtgtgctgtgccccacaaggagacatgatctatgaccccagctggcaccatccgcctccactgataccctattattccaagatggtctttgaaacaggacagtttgacgatgctgaagattgagtgtggagctttctgccttgtaggtgggcgggcctccacgtcaagatctcttttcctgtcttggaggtgaaaagtcatatctgagaaaatgtttgcagtgacccctagtctggggtacacagaccagtgttccttattgacagtgttcaataaggccccgtcattctcgccagtctgttgttgttcttaatgggctcctccttgaaatgtgtgtgtgtttgtgtcaagaggagttgtgttctttgtaaataaaggttaaaaaaaaaaa

SEQ ID NO: 85 - DNA, 2119 bp, Homo Sapiens
gggagtccccgaagggtagttgctcgtcggagttccccagcaaacagtgaccaagccagacctcaggcttctagtttcggcttcgctgcttgacgggccgggctgccccgccgcgcattctgagacctggccgcggctcggaggctcccgcgcactcgggtccgggtcctgtgggtccaagggccgctgggcaggcggcgaggacttggccgaccttggcccagatggcctgatatgaaggagtcacgcctcccgcctcccggagctgcccagtggctgccttgtccttcaagtgcaggagctggttcaaatgtcaggaatggaagccactgtgaccatcccaatctggcaaaacaagccacatggggctgctcgaagtgtagtaagaagaattgggaccaacctacccttgaagccgtgtgcccgggcgtcctttgagaccctgcccaacatctctgacctgtgtttgagagatgtgcccccagtccctaccctggctgacatcgcctggattgctgcggatgaagaggagacatatgcccgggtcaggagtgatacgcgccccctgtggcacacctggaaacccagccctctgattgtcatgcagcgcaatgcctctgttcccaacctgcgtgggtccgaggagaggcttctggccctgaagaagccagctctgccagccctaagccgcactactgagctgcaggacgagctgggccacttgcgcagccagattgcaaagatagtggcagctgatgcagcttcggcttcattaacgccagatttcttatctccaggaagttcaaatgtctcttctcccttaccttgttttggatcctcattccactctacaacttcctttgtcattagtgacatcaccgaggagacagaggtggaggtccctgagcttccatcagtccccctgctttgttctgccagccctgaatgttgcaaaccagaacacaaagctgcctgcagttcgtctgaagaggatgactgcgtctctttgtccaaggccagcagctttgcagacatgatgggtatcctgaaggactttcaccgaatgaaacagagtcaagatctgaaccggagtttattgaaggaggaagaccctgctgtgcttatcactgaggtcctaaggaggaagtttgctctaaaggaagaagatatcagtagaaaaggaaattgacaaccctcagctctgcaaactcagtctcatgctcctggaataccttcaatagctgccttcctcaccgcagatgtttctgcctcttaaggatagatcttctgcaacagtcttgctgacaagctagagcttggactgaaagagaagagctggattatatatttcccagacttcaaaccctagcagaagctaaggcttgtgatttgacctgagacatttgtttcaggtaatcgtgtagaatgaagcatcttagtttaaagggtaagagagaagttgtttctggtttttccttgcccctgtgtgaaaataggtcctaaatgactgacttcactgcattagaccctatagctggtctcacaagacactttgtgcccagctgtcactcactctcagcagcttccttgcagcagagcagggctgaggggaaggggctatgaatgtttgtatacgtgttcacagggcacggaaaatcttatgctgctccgtcataaacctacaccaatgcccagcaatcaccctcctcacttccttgtctagatgtagaggtcaggctgctgaaccagccaacacatgggctactgctgggaagcctgggctgttttttttcttaaacacattttatattactgaacaaccaaatctaccctccacggccctgaggccttatcagttccactgattaaaaactttctcttccacggactttaagcccggtaggaaagagagaggaggagggggaaagagcaaaccatctttcttccaggcccttgactgctcctttgggctgggccaaggtttgtatgtaccacaccatgcatgactcagatgccctcaggtccctttctctatggtatgtatactgcttgtgcttgggttgaagcactacctgacattaaaggaaggacttggagagagaaaaaaaaaaaaaaaaaa

SEQ ID NO: 86 - DNA, 1224 bp, Homo Sapiens
gcccattgtttttgtaatctctgaggagaagcagcagcaaacatttgctagtcagacaagtgacagggaatggattccaaacaccagtgtgtaaagctaaatgatggccacttcatgcctgtattgggatttggcacctatgcacctccagaggttccgagaagtaaagctttggaggtcacaaaattagcaatagaagctgggttccgccatatagattctgctcatttatacaataatgaggagcaggttggactggccatccgaagcaagattgcagatggcagtgtgaagagagaagacatattctacacttcaaagctttggtccacttttcatcgaccagagttggtccgaccagccttggaaaactcactgaagaaagctcaattggactatgttgacctctatcttattcattctccaatgtctctaaagccaggtgaggaactttcaccaacagatgaaaatggaaaagtaatatttgacatagtggatctctgtaccacctgggaggccatggagaagtgtaaggatgcaggattggccaagtccattggggtgtcaaacttcaaccgcaggcagctggagatgatcctcaacaagccaggactcaagtacaagcctgtctgcaaccaggtagaatgtcatccgtatttcaaccggagtaaattgctagatttctgcaagtcgaaagatattgttctggttgcctatagtgctctgggatctcaacgagacaaacgatgggtggacccgaactccccggtgctcttggaggacccagtcctttgtgccttggcaaaaaagcacaagcgaaccccagccctgattgccctgcgctaccagctgcagcgtggggttgtggtcctggccaagagctacaatgagcagcgcatcagacagaacgtgcaggtttttgagttccagttgactgcagaggacatgaaagccatagatggcctagacagaaatctccactattttaacagtgatagttttgctagccaccctaattatccatattcagatgaatattaacatggagggctttgcctgatgtctaccagaagccctgtgtgtggatggtgacgcagaggacgtctctatgccggtgactggacatatcacctctacttaaatccgtcctgtttagcgacttcagtcaactacagctgagtccataggccagaaagacaataaatttttatcattttgaaataa

SEQ ID NO: 87 - DNA, 2515 bp, Homo Sapiens
ccctatcccgtcttgctctgcggcgcaggggcaagatggctgctgagaagcaggtcccaggcggcggcggcggcggcggcagtggcggcggcggtggcagtggcggcggcggtagcggcggtggacgtggtgccggaggggaagaaaataaagaaaacgaacgcccttcggccggatcgaaggcaaacaaagaatttggggatagcctgagtttggagattcttcagattattaaggaatcccagcagcagcatggtttacggcatggagattttcagaggtacaggggctactgttcccgtagacaaagacgtcttcgaaaaacactcaacttcaagatgggtaacagacacaaattcacagggaagaaagtgactgaagagcttctgaccgataatagatacttgcttctggttctgatggatgctgaaagagcctggagctacgccatgcagctgaaacaggaagccaacactgaaccccgaaaacggtttcacttgttatctcgcctacgcaaagccgtgaagcatgcagaggaattggaacgcttgtgtgagagcaatcgcgtggatgccaagaccaaattagaggctcaggcttacacagcttacctctcaggaatgctacgttttgaacatcaagaatggaaagctgccattgaggcttttaacaaatgcaaaactatctatgagaagctagccagtgctttcacagaggagcaggctgtgctgtataaccaacgtgtggaagagatttcacccaacatccgctattgtgcatataatattggggaccagtcagccatcaatgaactcatgcagatgagattgaggtctgggggcactgagggtctcttggctgaaaaattggaggctttgatcactcagactcgagccaaacaggcagctaccatgagtgaagtggagtggagagggagaacggttccagtgaagattgacaaagtgcgcattttcttattaggactggctgataacgaagcagctattgtccaggctgaaagcgaagaaactaaggagcgcctgtttgaatcaatgctcagcgagtgtcgggacgccatccaggtggttcgggaggagctcaagccagatcagaaacagagagattatatccttgaaggagagccagggaaggtgtctaatcttcaatacttgcatagctacctgacttacatcaagctatcaacggcaatcaagcgtaatgagaacatggccaaaggtctgcagagggctctgctgcagcagcagccagaggatgacagcaagcgctcaccccggccccaggacctgatccgactctatgacatcatcttacagaatctggtggaattgctccagcttcctggtttagaggaagacaaagccttccagaaagagataggcctcaagactctggtgttcaaagcttacaggtgttttttcattgctcagtcctatgtgctggtgaagaagtggagcgaagcccttgtcctgtatgacagagtcctgaaatatgcaaatgaagtaaattctgatgctggcgccttcaagaacagcctaaaggacctgcctgatgtgcaagagctcatcactcaagtgcggtcagagaagtgctccctgcaggccgcagccatccttgatgcaaacgacgctcatcaaacagagacctcctcctcccaagtcaaggacaataagcctctggttgaacggtttgagacattctgcctggacccttcccttgtcaccaagcaagccaaccttgtgcacttcccaccaggcttccagcccattccctgcaagcctttgttctttgacctggccctcaaccatgtggctttcccaccccttgaggacaagttggaacagaagaccaagagtggcctcactggatacatcaagggcatctttggattcaggagctaaccaggctcttcctcgggggcgggggagattctgactcttaatctgtattgtgagaaaatcccagcaagttccatgatattaaatccaggtctgcattggcccggggcaagagtttaacatcttcggccctgcattcctacatcttgtgtctgtacacgttcttaagcagcgtgtcaggagagcaccctgttgtcttctggtaaatgtgtgcagggtcatcctgtctcctgtacctcctgggaaaggggccgctgctgtctggtgccctgtgagctgtgattgattgcctttggtcagtaatgcgttcaggagtccacaccaggcacagatggggccttgaaacgctttgtcatgcttcttcagtaccatggatttgaaatgaactcatccttgctgtgagcatccaggagcccttgagaagtttatctatgactatgaaactggcaacgtcaccccagaattacggtcagccttattccccttcacctcccagtgaacgctaagaagtttcagacaagcagagagctctatttttagaagaaatatgttacactcagaaatgatgaaaccaaatcttatattaaaaggcaaagatg

SEQ ID NO: 88 - DNA, 4339 bp, Homo Sapiens
ctcgggtcgcgggcgttggcagccgggcgggtgggaggggccggagcaaaagttccgggcgcccgagccggctgctcgtgccatggagcggagtcccgacgtgtcccccgggccttcccgctccttcaaggaggagttgctctgcgccgtctgctacgaccccttccgcgacgcagtcactctgcgctgcggccacaacttctgccgcgggtgcgtgagccgctgctgggaggtgcaggtgtcgcccacctgcccagtgtgcaaagaccgcgcgtcacccgccgacctgcgcaccaaccacaccctcaacaacctggtggagaagctgctgcgcgaggaggccgagggcgcgcgctggaccagctaccgcttctcgcgtgtctgccgcctgcaccgcggacagctcagcctcttctgcctcgaggacaaggagctgctgtgctgctcctgccaggccgacccccgacaccaggggcaccgcgtgcagccggtgaaggacactgcccacgactttcgggtgaggagcctgatagccgaagagagaaggaactttttaccaactcaccagtggatagtgacaaagacaaggctccaaaccagctctcctaaccttcagtccaggaggcaaggccaagtgcaggaacatggagcatgcactgcgggagaaggccaaggccttctgggccatgcggcgctcctatgaggccatcgccaagcacaatcaggtggaggctgcatggctggaaggccggatccggcaggagtttgataagcttcgcgagttcttgagagtggaggagcaggccattctggatgccatggccgaggagacaaggcagaagcaacttctggccgacgagaagatgaagcagctcacagaggagacggaggtgctggcacatgagatcgagcggctgcagatggagatgaaggaggacgacgtttcttttctcatgaaacacaagagccgaaaacgccgactcttctgcaccatggagccagagccagtccagcccggcatgcttatcgatgtctgcaagtacctgggctccctgcagtaccgcgtctggaagaagatgcttgcatctgtggaatctgtacccttcagctttgaccccaacaccgcagctggctggctctccgtgtctgacgacctcaccagcgtcaccaaccatggctaccgcgtgcaggtggagaacccggaacgcttctcctcggcgccctgcctgctgggctcccgtgtcttctcacagggctcgcacgcctgggaggtggcccttggggggctgcagagctggagggtgggcgtggtacgtgtgcgccaggactcgggcgctgagggccactcacacagctgctaccacgacacacgctcgggcttctggtatgtctgccgcacgcagggcgtggagggggaccactgcgtgacctcggacccagccacgtcgcccctggtcctggccatcccacgccgcctgcgtgtggagctggagtgtgaggagggcgagctgtctttctatgacgcggagcgccactgccacctgtacaccttccacgcccgctttggggaggttcgcccctacttctacctggggggtgcacggggcgccgggcctccagagcctttgcgcatctgccccttgcacatcagtgtcaaggaagaactggatggctgagctggcccggggctgccccggtcttgtgccacagcactgttttctttctgccctcttcctaatgcccacactgcttgggcactattgcgcccctgcctccttgccaggctcttcctcctgtcctgcctggtccttttccatgactccaggctgtgcctctctccatgtttggtcccttctgtgcccatggtcaggagctattcgggtggcacctcgctggccaggctctcccgagtcgtggcacctccacaatgtgaattttctgaatccctattccaggatttctgggaataatgtttacttctagaatgggcctgttgtaaaccatctcatcgaggtgtggtaaagccattggatgaggaggggactgccatggaaaggagagtttgttacttacggttctgagaggaggggccacataggaaagccccacggtgggtcagaaggcggaaggagggaggggaacgtgtgggcaagagacttcctctggtttcctcaggaggaaatgggcaaggcagagtaagcaggggagacaggtttaagggtagctggcttgagtaatttcagtggctctcaggataggggctgccctttttgtctgatacctggccccgggatagtcaggacaggtgaatgttggcctggggtgtgacagccctgggagagccatgtgaaggaggcagctggcgccatcgctccggattagttggtttccataggaaaggcatgctttcagccagatgcttgccatctctagggattgggggattggctagcctgggaggatcagtctgtccaggtcagcgaggccccagataccagagcatcaagagtacaggaaatacagttaatgcagggcctctgtgtggctggatcctccgtctccatcagatcagctctgattgatctattcttgcacgatttcctctgaacacagggttccagagtacttaaacacaacattttttaaatcgtgatttcggcctatttccttgccaggcctgtttccccaccaggaaatgagataggaggactggatgaggatgtcctgttatagttgctgtggaggaagttcctctggttaattctcatcagcgtctgcagaaaagaaggaaagagggcacccttttcagttgggaagaaaggagaggggtggcgccatggacgtggccctaaacgctgtgggagagggaagaggaggctgggcctcgctgccctcttgtctctgctgacttcagcctggtcatgcttgctctgccacttgcgatttcatccctaatttcttcctccaccatgcctgcagacttttccctgggcttgttttttctcgcacatctctgaagagtttttaatcttcagctcatcatgtcccaggaagtggcatcataaaaggaaatatttttttttcctaggagcagtgttaaaatctgggtcacattcctgaccaaggacagcatcctgccttttggccatccccttcagttcacaaaagctgacattttaaacaaatcatgactcacacgtattaattggttataaatatgttgtgtacactggttagataaaacttaaggccacaaggagggcccaggtaggcgatgtcagtgtgtgaaggggctggattgggcgtggtgaggatgttggcaaaccagtgcatgcacctggttggaagatgctcagcctcacaaaagctccaagccctttgggagccaaagtgtctgagagtgtgaccctctcctgtaaagtatttatcccacccattaatataatttctgtataataaacttgacctgaaattatttcattctttatattaaacttttaaaaatgttttttattttcaccttagatatgggaagagttttttttttttttttttttttaacaggataacttgagcaggctaggcctcttaaaaaaaaatttgagctaaaactcatttttcttttggcattttcttttcaatgttcttataagcaaagttcatccatgttgtagcatgtgttcaactttattttttcatcgggtaatattccattgtatggaatggtagtactacattttatttatcatgcatcgattggtggacatttggatcgtttctacttcttgactattatacataatgctgctaggaacttttgtgtatgagtttttgtgtggacatatgttttcatttctctttggtatatgcctgggagcagatttgctggatcatatgaaactctatttaacccttgagggactcccaaactgttttccaatgtggtgacacaattttatatcccatcaacagggcatgagggttctgatgactccacatccctcagtgctttttattatctatcttttaacttagccatcctagtaggggtaatgtggcatctcattgtgattttggtttgcatttccctgatggcgaatgatattgagcatcttttcatgagcttattggccatttgcatatcttcttaggacagctatctttagatcacttgctcattttttaattgggttatttgtctttttattattgagttgtaagagtccttttatagcctggcacaagtccctttaactggtatatgattataaaatttttctccgtgagctgtttcatttccttgatgatgtcctttgaaatactaaagcttttaattttg

SEQ ID NO: 89 - DNA, 3635 bp, Homo Sapiens
agcgtcatagcggcgggcatcccatctgcacgtcacacctctttctcacctggacacgcatcccttcctaccctgccagccacgacgtttcctctttcccctctccaatgcccagccccagatctggcggaagaagatggagaacgggggtgggacagagttgtggacaacctctcaggagagggtcgcaaggtgggaccctgaacagtggtagaaacaaaatgagattgtccctgaagtttgcccttcagctgagacacaaggagtagaggaagaggaaggactaacgcagaggcactcaaggtctcactatgactgtagttgagagtcctctcccttcttccctaaccctttccccatttctctcaccacttctttgccagtctagatccgtcctggtgccttactgtgcatacagttctactcgtctcagattcctttcttgtctgttagaaacgtatgtcaaacgaggatacagtgtctggaactattggttctaagatataagtggaatgagcctggatcaggagaagtatgctgagctagagttgaaggaagcttctctttctaacaagagaaagcagagttaaattatggcagagacaagtctgttagaggctggggcctctgcagcctctacagctgcggctttggagaacttacaggtggaggcgagctgctctgtgtgcctggagtatctgaaggaacctgtcatcattgagtgtgggcacaacttctgcaaagcttgcatcacccgctggtgggaggacctagagagggacttcccttgtcctgtctgtcgaaagacatcccgctaccgcagtctccgacctaatcggcaactaggcagtatggtggaaattgccaagcagctccaggccgtcaagcggaagatccgggatgagagcctctgcccccaacaccatgaggccctcagccttttctgttatgaggaccaggaggctgtatgcttgatatgtgcaatttcccacacccaccgggctcacaccgttgtgccactggacgatgctacacaggagtacaaggaaaaactgcagaagtgtctggagcccctggaacagaagctgcaggagatcactcgctgcaagtcctctgaggagaagaagcctggtgagctcaagagactagtggaaagtcgccgacagcagatcttgagggagtttgaagagcttcataggcggctggatgaagagcagcaggtgttgctttcacgactggaagaagaggaacaggacattctgcagcgactccgagaaaatgctgctcaccttggggacaagcgccgggacctggcccacttggctgccgaggtggagggcaagtgcttacagtcaggcttcgagatgcttaaggatgtcaaaagtaccctggaaaagaatattcctagaaagttcggaggctcactctcaacgatctgtccacgggatcataaggctctccttggattagtaaaagaaatcaacagatgtgaaaaggtgaagaccatggaggtgacttcagtatccatagagctggaaaagaacttcagcaattttccccgacagtactttgccctaaggaaaatccttaaacagctaattgcggatgtgaccctggaccctgagacagctcatcctaacctagtcctgtcagaggatcgtaagagcgtcaagttcgtggagacaagactccgggatctccctgacacaccaaggcgtttcaccttctacccttgcgtcctggctactgagggtttcacctcaggtcgacactactgggaggtggaggtgggcgacaagacccactgggcagtgggtgtatgccgggactccgtgagccgaaagggcgagttgactccactccctgagactggctactggcgggtgcggctatggaatggggacaaatatgcagccaccaccacaccttttacccctttgcacatcaaggtgaaacccaagcgggtaggcatattcctagactatgaggccggcacactgtctttctacaatgtcacagaccgctctcatatctacaccttcactgatacttttactgagaaactttggcccctcttctacccaggcatccgggctggacggaagaatgctgcaccacttaccatcaggcccccaacagattgggagtgacaggttgggatgtgggaatgactggggtgaggcagggtcaagtgctacgggcctccttcccgtgtcctgctggaacgtcttcgtgtccacctgggtccagtcctgaatcatcttggagaaacaccttggtttctaggatggttttgtgtggagggggaggtaggactgggctggatgagagagcacagctgtgacttcctcctaactgtcagggtggggagctggttcccagaggattgtctaccctgaagtccatcaggttttctgttgcacaaggacgggtcaggaaggaaggagaggcttttccagaaacaaaaaatctgtgagggtctgacttgctcaaaccagaggaggaaacagaaacccctgcacatctttttagggggttctttgacccaggatagtcttgcttcttgaggtagatcacaggggtctgtgtacctctgaattcatgagagatgaatgacagatgctctcatgggtctagatattgaggagtttttctgagggcagagattggacatcaacaaggctagaagggtcagggaagtgggctaaaggaacagattcctagagattaatgaagaggagggaggtttctttggtcttctattccaagggtaaggttgcgattatgggtaagattggccagaggtaggaatgtggggagaaggagaggctgaaaagaaagcagaggagaacccaggtccctgcctcagccttcagcagagttggcttattgcctgcctctataccaataagtcagtcaccttgctcctctccagaggcaaagtggaagagatcctgcaagacacatctatcctttcacagtgttcccaagggaacttggaaaggagagtcaggtattagaggaaagagaagggtatttgtatacaaagccctggccttaaagaatgttacttagtagctactcccaaattgtcagccttcttacctggccaaggtgtccaagccagaaaggaaaaaaggttatggagtctttctcaccctaaggacagggtggaagagggtggtatatagggaagggccagataggcaacttcatttggcttgtgtgcatctggcctggaactggtgttaagccaggcttttgcttgtttgttgccatccctcaccctttgccatttcccttttcagagaatgtaaatgattttcatgttaggccaaaataaacaacttatagggtacatatgttgtcataaaaggtaaaagtgatgcatgccaaaccaaactaaaccaatttggattatctgctattcgggtaatcttcacagaaatgactgagagaagaatctgcagtttactgagggcatttcagttcctcctaccacctcaacaggactttgtccagactctcctcctcttacctttgtgccttgactgtggttctttgtggcaagatactttggttggttaaaataatatggaacaaaggatccactgaagtgaaaaaaaaaaaaaaaa

SEQ ID NO: 90 - DNA, 5118 bp, Homo Sapiens
ttctaatgatcccatcaccaaagtagcaaacgtagtacccaggattttttttttcctagttagtcttcatgttaagtacaatcttacctcaaaattgttaatgtctgtggtttaaaaaaaaacatgaatcagaaatggtgtgggtagtttagaaaatgagttaggttcaggtggccggttagctcagttggtcagaaaatgagttaggttcatctgggaagacttcctgggagaaaagaccctgggttctgaggtaaagtggagtagggataagatgtgcaaggcaggaagggagttgattccttaggtaagtgaattattggaggtgaggggtatgtctggctcctgagtcagccacgatgtgcctccttgtcttcccccttgtccccaggagtccagattacatcctaccctgcagtcctggatggcgcctccgacttgcagcttccttcctgctttccgtcttcccgctgctagaccttcttccagttgctttgccaccaggggcaggcccaggacccatagggctagaggtgttggcagggtgcgtggcagctgtggcctggatcagccacagcctggccctgtgggtgttggcacattcccctcatggccactcccggggtcccttggccttggccctggtagccttgctgccagctccagccctagtgctgaccgtgttgtggcattgccagcgaggcacacttctgcccccacttctcccagggcccatggcccgcctatgcttgctcatcctgcagctggctgcactcttggcctatgcactgggatgggcagctcctgggggaccacgagaaccctgggctcaggagcccctcctgcccgaggatcaagaacctgaggtggctgaagatggggagagttggctgtcacgcttttcctatgcctggctggcacccttgctggcccgtggggcctgtggagagctccggcagcctcaggacatttgccgcctcccccacagactgcagccaacctacctggctcgtgtcttccaggcacactggcaggagggggcacggctgtggagggccttgtatggggcctttggacggtgctatctggcacttggactgctgaagctggtggggaccatgttgggattctcagggcccctgttgctctccctactggtgggcttcctggaagaggggcaggagccactaagccacggcctgctctatgctctggggctagccggtggggctgtgctgggtgctgtgctgcagaatcagtatgggtatgaggtatataaggtaacacttcaggcacggggggctgtgctgaacatcctgtactgcaaggctttacagctggggcccagccgccctcctactggggaggccctgaacctactaggcactgactctgaacggctgcttaactttgctgggagcttccatgaagcctggggcctgcccctgcaactggccatcaccctctacctgctgtaccagcaggtaggcgtggccttcgtgggtggtctcatcttggcactgctgctggtacccgtcaacaaagtgattgccacccgcatcatggccagcaaccaggaaatgctacagcacaaggatgcgcgggttaagcttgtgacagagctgctgagtggcattcgggtcatcaagttctgcgggtgggagcaggcactgggagcccgagtagaggcctgccgggctcgagagctggggcgactccgggtcatcaaatacctggatgcggcctgtgtatacctgtgggctgccctaccggttgtcatctccatcgttatcttcatcacctatgtcctcatggggcaccagctcactgccaccaaggtgttcacggccctggcactggtgcgaatgctcattcttcctctcaacaacttcccttgggtgatcaatggtctcctggaggccaaagtgtccttggaccggatccagcttttcctcgaccttccaaaccacaacccccaggcctactacagcccagattgtggtagattaggagcccaaatcaagtggcttctctgttcagatccccctgcagagccatctacagtattggagctgcatggagccttgttctcctgggacccagttggaaccagcctggagaccttcatcagtcatctcgaagtgaaaaagggtatgctggtgggcatcgtggggaaggtcggctgtgggaagagctccctgctggctgccatcgctggagagctccacaggctgcgtgggcatgtggcagtgcgggggctgtccaagggctttggcctggccacccaggaaccctggatccagtttgccaccatccgagacaacatcctctttgggaagacatttgatgcacagctgtacaaggaggtgctagaagcctgcgccctcaatgatgacctcagtatcctgcctgctggagaccagacagaggtgggggagaagggtgtcacccttagcggaggacagcgtgcccggattgcccttgctcgtgctgtctaccaggaaaaggagctctatctcctcgatgaccctctggccgctgtggatgcagatgtggccaaccacctgctgcacaggtgcatcctgggcatgctgagctacaccacacggctgctctgcacccaccgcactgagtacctggagagggctgacgcggtgctgctgatggaggccgggcgcctcatccgggctggacctccctctgagattctgccactggtacaagctgtccccaaagcctgggctgagaatggacaagagtctgactcagccacagcccagtcagtacagaacccagagaaaacaaaggaggggctggaggaggagcagagcacatctggtcgcctgctgcaggaagaaagcaagaaggagggcgccgtggccttgcacgtgtaccaagcttactggaaggccgtgggccagggcttggccttagccatcctcttctctctgcttctcatgcaagccacgcggaacgctgctgactggtggctctcccactggatctctcagctgaaggctgagaatagctcccaggaggcgcaaccctccaccagcccagcttctatggggctcttctctccgcagctgctcctcttttcccctggaaacctctacatcccagtgttcccactgcccaaagctgcccccaatggctcctcagacatccgtttctacctcaccgtgtatgcgaccattgctggtgtaaattccctctgcacccttctccgggcagtgctctttgcagcaggcacccttcaagcagctgccactctgcatcgccgcctgctgcatcgagtccttatggcaccagtgactttcttcaatgccacacccacgggccggatcctaaaccgcttctcctctgatgtggcctgtgcggatgacagcctgcccttcatcctcaacatcctcctggccaacgcggcaggcctgctggggctcctggccgtgctgggctctggcctgccctggctgctgctcctgctgccgcctttgagcatcatgtactatcacgtgcagcgccactacagggcctcctcacgggagctgcggcgcctgggcagcctcaccctgtctccactgtatagccatctggccgataccttggctggcctctctgtgctccgggccacaggggccacctacaggtttgaggaggagaacctgcgactccttgagctaaaccagaggtgccagtttgccaccagtgccacaatgcagtggctggacattcggctacagctcatgggggcggcagtggtcagcgctatcgcaggcatcgctctggtgcagcaccagcagggcctcgctaacccagggctggtgggcttgtcgctgtcttatgccctgtccctgacgggcctgctctcgggcctggtgagcagcttcacacagacagaggccatgctggtgagcgtcgagcggctggaagagtacacctgtgacctgccccaggaaccccagggccagccactgcagctgggcaccggctggctgacccaggggggcgtggagttccaggacgtggtgttggcgtaccggccagggctgccgaatgccctggatggagtgaccttctgcgtgcagcctggagagaagttgggcatcgtgggccgcacaggctccggcaagtcttccctgttgttggtgctcttccggctgctagagcccagttcagggcgagtgctgctggacggcgtggacaccagccagctggagctggcccagctcagatcccagttggctatcatcccccaggagccctttttgttcagtgggactgttcgggaaaacctggacccccagggcctacataaggacagggccttgtggcaggccctgaagcagtgccacctgagtgaggtgattacatccatgggtggtctggatggtgagctgggtgaggggggccggagcttatctcttgggcagaggcagctgttgtgtttggccagggctctcctcacagatgccaagatcctgtgtatcgatgaggccacagcaagtgtggaccagaagacagaccagctgctccagcagaccatctgcaaacgctttgccaacaagacagtgctgaccattgcccataggctcaacacgatcctgaactcagaccgggtgctggtgctacaagcggggagagtggtagagctggactccccggccaccctgcgcaaccagccccactccctgttccagcagctgctgcagagcagccagcagggagtccctgcctcactcggaggtccctgagcccaatcccacaccctgcagagttctcccctctctctgatccaggccgggcctatacagaggtgctggctgcttgtttacattctcctctggggctctacctctccacacttccccagaagggaaaagggcaccctggattactctttggaaatcactccttggtgggcagcatcctgaggcttccccagaaccaggcctctgctctggccctcttgcatctggaacgccaggtgggtttttctggcataggagcccacttgcattttcatagttttatttgataaaattccatcttacattctgtgtattaaaaaaataatatttctggtgtaaaaaaaaaaaaaaaaaaaaaaaaaaaaaa

SEQ ID NO: 91 - DNA, 2093 bp, Homo Sapiens
cgctgtttcgtgggaccaggattgaaacaagatggcgggttcgtggtgagaagccgtcaagcaggagtagaaattggtatgcttagaagcagattctaaaagcagtttctcttcagaacatcttttttcataccacttgataagcatcttgaaacaccatggctgtagctgcagtaaaatgggtgatgtcaaagagaactatcttgaaacatttatttccagtccaaaattcgggcgtacatgtgcagatggagctttatattgtgtttgtcataaatctacgtattctcctctaccagatgactataattgcaacgtagagcttgctctgacttctgatggcaggacaatagtatgctaccacccttctgtggacattccatatgaacacacaaaacctatccctcggccagatcctgtgcataataatgaagaaacacatgatcaagtgctgaaaaccagattggaagaaaaagttgaacaccttgaggaaggacctatgatagaacaacttagcaaaatgttctttactactaagcaccgttggtatcctcatggacggtatcacagatgtcgtaagaatctgaatcctccaaaagacagatgatgcggaggttcctgggggaatcaaagagaaatgtgcctcatttgccatttgagaaaatgcagtctggtgtattcagtaatatatagtaaagtaataatgataaaatatcttttcatatattagaatgtgtacttttatataaagtaattctggatttgacattctcatttagagaaacctattttcttttttctttttctattttagtgtttcatttatgtgcggtctccaatttaggacttttccatagtgccaaagccatacatattcagtagaacatcaataaattacatcagaaattcaacactttattataaaacgggcttcgtgttagataattttgctaaacagtaggctactgtaagtgttctgagcatatttaagacaggctagcattttcaatttacaatattttcaactgatagtaggtttattgggatgtaaccctatgataagttgagaaacatctctttttgtgtgtctactgtgatttaagtatttttaatcatcagccaagcattgttagtagtataaatatgattaataaaaatgtgcatggctttcctgaaggagattttttaattgcctttgagaataaactcataaggtctaccaagaaaataaatgttatgatgtttcagttggcttctaggaaataattaaattagtgatattttaatcaggttttactatctgctaggccccttccatcaattcttattaaattctcaaaataatcctttgaaaagggagtataattacattttacagtgactcgaaccttacccaaacaagtgggagagccaggagccaaactatcaggctccaaagcttttttttagtgcatcacaatgacaaaggggtggttttctttcacccaagaatgtgctttcctggaaatttttctagatagaatattatgtaatttgttttgaaggttttttttcctgactgtcttaaagattatgctagctttagaacacatgcaaacagctgcagctctgtgattaaaatgttaaggtcactagaatagtgttaggaaaatgttaatagataattctgctgcctctattagcttatgtatgatccttaatagcattgcttccccttcagtttctatttaggaggtgaagaatcttttaataaggtagaaagttgctttatttaaatttgtactgtagaatgtttgtgatacagtatttgtaaaattgatatgaaaaataatttctcaaagtctattgtttgatctagttattttaataaaggaactctagaagtttcaagtggccagtgaagtgtgaggaatagagagtaaaggaaataattaataatggtgaccctctgttaagtggtttactttttccattaatataaatttcatttggaaagattaaaaaaacaagtttgattgaacttgataaatcagaaatatttaaaaaaaaaaaaaaaaaaaaaaaaaaaaaaaaaaaaaaaaaaaaaaaaaaaa

SEQ ID NO: 92 - DNA, 2882 bp, Homo Sapiens
gtgcagcctgagaggaaacaaagtgctgcgagcaggagacggcggcggcgcgaaccctgctgggcctccagtcaccctcgtcttgcattttcccgcgtgcgtgtgtgagtgggtgtgtgtgttttcttacaaagggtatttcgcgatcgatcgattgattcgtagttcccccccgcgcgcctttgccctttgtgctgtaatcgagctcccgccatcccaggtgcttctccgttcctctaaacgccagcgtctggacgtgagcgcaggtcgccggtttgtgccttcggtccccgcttcgccccctgccgtcccctccttatcacggtcccgctcgcggcctcgccgccccgctgtctccgccgcccgccatggcgactgcgacccccgtgccgccgcggatgggcagccgcgctggcggccccaccacgccgctgagccccacgcgcctgtcgcggctccaggagaaggaggagctgcgcgagctcaatgaccggctggcggtgtacatcgacaaggtgcgcagcctggagacggagaacagcgcgctgcagctgcaggtgacggagcgcgaggaggtgcgcggccgtgagctcaccggcctcaaggcgctctacgagaccgagctggccgacgcgcgacgcgcgctcgacgacacggcccgcgagcgcgccaagctgcagatcgagctgggcaagtgcaaggcggaacacgaccagctgctcctcaactatgctaagaaggaatctgatcttaatggcgcccagatcaagcttcgagaatatgaagcagcactgaattcgaaagatgcagctcttgctactgcacttggtgacaaaaaaagtttagagggagatttggaggatctgaaggatcagattgcccagttggaagcctccttagctgcagccaaaaaacagttagcagatgaaactttacttaaagtagatttggagaatcgttgtcagagccttactgaggacttggagtttcgcaaaagcatgtatgaagaggagattaacgagaccagaaggaagcatgaaacgcgcttggtagaggtggattctgggcgtcaaattgagtatgagtacaagctggcgcaagcccttcatgagatgagagagcaacatgatgcccaagtgaggctgtataaggaggagctggagcagacttaccatgccaaacttgagaatgccagactgtcatcagagatgaatacttctactgtcaacagtgccagggaagaactgatggaaagccgcatgagaattgagagcctttcatcccagctttctaatctacagaaagagtctagagcatgtttggaaaggattcaagaattagaggacttgcttgctaaagaaaaagacaactctcgtcgcatgctgacagacaaagagagagagatggcggaaataagggatcaaatgcagcaacagctgaatgactatgaacagcttcttgatgtaaagttagccctggacatggaaatcagtgcttacaggaaactcttagaaggcgaagaagagaggttgaagctgtctccaagcccttcttcccgtgtgacagtatcccgagcatcctcaagtcgtagtgtacgtacaactagaggaaagcggaagagggttgatgtggaagaatcagaggcgagtagtagtgttagcatctctcattccgcctcagccactggaaatgtttgcatcgaagaaattgatgttgatgggaaatttatccgcttgaagaacacttctgaacaggatcaaccaatgggaggctgggagatgatcagaaaaattggagacacatcagtcagttataaatatacctcaagatatgtgctgaaggcaggccagactgttacaatttgggctgcaaacgctggtgtcacagccagccccccaactgacctcatctggaagaaccagaactcgtggggcactggcgaagatgtgaaggttatattgaaaaattctcagggagaggaggttgctcaaagaagtacagtctttaaaacaaccatacctgaagaagaggaggaggaggaagaagcagctggagtggttgttgaggaagaacttttccaccagcagggaaccccaagagcatccaatagaagctgtgcaattatgtaaaattttcaactgtcttcctcaaaataaagaagtatggtaatccttacctgtatacagtgcagagccttctcagaagcacagaatatttttatatttcctttatgtgaatttttaagctgcaaatctgatggccttaatttcctttttgacactgaaagttttgtaaaagaaatcatgtccatacactttgttgcaagatgtgaattattgacactgaacttaataactgtgtactgttcggaaggggttcctcaaattttttgactttttttgtatgtgtgttttttctttttttttaagttcttatgaggaggggagggtaaataaaccactgtgcgtcttggtgtaatttgaagattgccccatctagactagcaatctcttcattattctctgctatatataaaacggtgctgtgagggaggggaaaagcatttttcaatatattgaacttttgtactgaatttttttgtaataagcaatcaaggttataattttttttaaaatagaaattttgtaagaaggcaatattaacctaatcaccatgtaagcactctggatgatggattccacaaaacttggttttatggttacttcttctcttagattcttaattcatgaggagggtgggggagggaggtggagggagggaagggtttctctattaaaatgcattcgttgtgttttttaagatagtgtaacttgcttaaatttcttatgtgacattaacaaataaaaaagctcttttaatat

SEQ ID NO: 93 - DNA, 6856 bp, Homo Sapiens
agccttgagtgtcattcaagggacagcacaacctcatccaagctctcctacctctgcccagccgtccctctcatcctccccattcctcgtccacactccatccaaagaagagggaaagcaccgaatagaggggggcgaaggcaaagtctgctgttcttccccctgggcccccttgctcctccatcctcattctctcaccaccagcccccctaaccccaaggagcccaggaactgaggcgactcgccccactgccatgtccaaaagcttgaaaaagaaaagccactggactagcaaagtccatgagagtgtcattggcaggaacccggagggccagctgggctttgaactgaaggggggcgccgagaatggacagttcccctacctgggggaggtgaagcccggcaaggtggcctatgagagcggcagcaaattggtgtcggaggagctgctgctggaggtgaacgagacccccgtggcggggctcaccatcagggacgtgctggccgtgatcaaacactgcaaggaccccctccggctcaagtgtgtcaagcaaggaggaattgttgataaagaccttcgtcactacctcaacttacgatttcaaaagggttctgtggaccatgagcttcagcaaatcattcgtgacaacctctacctccgcacggtgccatgcaccacaaggccacataaggagggtgaggtccctggagtggattatattttcatcactgttgaagattttatggaattggagaaaagtggtgctctcctagaaagtgggacttatgaagacaattactacggtaccccaaagccgccagcagaaccagcaccattattgttaaatgtaacagaccagatacttccaggagccactccaagtgctgaaggaaaacggaagaggaataaatcagtgagcaacatggagaaagccagtatagagcctcctgaggaggaagaggaagagaggcctgtggtcaatggaaatggagtagtagtaacaccagaatccagtgaacatgaagacaaaagtgcaggtgcctcaggggagatgccctcccagccttatcctgcaccagtgtacagtcagcctgaggagctgaaggagcagatggatgacacaaagccaactaaacctgaagacaatgaggaaccagacccattgcctgataactgggaaatggcctatacagagaagggcgaagtctacttcattgaccataacacaaagacaacatcatggctggatccacgacttgcgaaaaaagctaaacctccagaagagtgcaaagaaaatgagcttccatatggctgggaaaaaatcgatgatcccatttatggcacttattatgttgaccacataaatagaagaacacagtttgaaaatcctgtcctggaagcaaaaaggaagctacagcaacataacatgccccacacagaacttggaacaaagcccctgcaggccccaggtttccgagaaaaaccactcttcacccgggatgcatcccagttgaagggaacattcctcagcaccaccctaaaaaagagcaacatgggctttggatttaccatcattggtggagacgagcctgatgagtttctgcaggtgaaaagtgtgattccggatgggcctgcagcacaggatggaaaaatggaaacaggtgatgtcattgtctatattaatgaagtttgtgtccttggacacactcatgcagatgttgtcaaacttttccagtctgttcctattggtcagagtgtcaacctggtgttgtgtcgtggctaccctttgccctttgatcctgaagaccctgctaacagcatggtgccaccccttgcaataatggagaggccacctccagtgatggtcaatggaagacacaactatgaaacatatttggagtacatttctcggacctcacagtcagttccagatataacagatcggccgcctcattctctgcactccatgccaactgatggtcagctagacggcacgtatccaccgcccgtccatgatgacaatgtgtctatggcttcatctggggccacccaagctgaacttatgaccttaaccattgtgaaaggtgcccagggcttcggcttcactattgccgacagtcctacaggacagcgggtgaaacaaatacttgacattcagggatgccctggcctgtgtgaaggcgacctcattgttgagatcaaccagcagaatgtacagaacctgagccatacagaagtagtggatatacttaaggactgtcccattggaagtgaaacttctttgattatccatcgaggaggtttcttttctccatggaaaactccaaagcctataatggaccgatgggagaatcaaggcagtcctcaaacgagtttatctgctccggccataccgcagaacctgcccttcccacctgcccttcacaggagctcctttcctgactcaacagaggcctttgacccacggaagcctgatccatatgagctctacgagaaatctagggccatttatgaaagtaggcaacaagtgccacccaggaccagttttcgaatggattcctctggtccagattataaggaattggatgttcatcttcggaggatggagtctggatttggcttcagaatcctcgggggagatgagcctggacagcctattttgattggagctgtcattgccatgggctcagccgacagagatggccgccttcacccaggagatgagcttgtgtatgttgatgggattccagtagccggcaaaacccaccgctatgtcatcgacctcatgcaccacgcagcccgcaatgggcaggtcaacctcactgtgagaagaaaggtgctatgtggaggggagccctgcccagagaacgggagaagtccaggctctgtatccacccaccacagctctccacgcagtgactacgcaacctacaccaacagcaaccacgctgcccccagtagcaatgcctctccccctgaaggcttcgcctcccacagcctgcagaccagtgatgtggtcattcaccgcaaagagaatgagggcttcggctttgtcatcatcagctccctgaacaggcctgagtctggatccactataactgtgccccataaaatcggacgcatcattgatgggagtcctgcagatcgctgtgcaaaactaaaagtgggagaccggatcctagcagtgaatggccagtctatcatcaacatgcctcacgctgacatcgtgaagctcatcaaggatgcaggtcttagtgtcacccttcgcatcattcctcaggaggagctcaacagccccacctcggcacccagctcagagaagcagagtcccatggcgcagcagagtcccctggcacagcagagtcccctggcccagccaagcccagccacccccaacagccccatcgcccagccagcaccacctcaaccacttcagctgcaaggacacgaaaatagttacaggtcggaagtgaaagcaaggcaagatgtgaaaccagacatccgacagcctccattcacagactacaggcagcccccgctggattacaggcaacccccaggaggggactaccagcagcccccacccttggactacaggcagcctcccctactggactacaggcagcactcccccgacaccaggcagtaccctctgtcggactacagacaaccccaggattttgattatttcactgtggacatggagaaaggagccaaaggatttggattcagcattcgtggaggaagggaatacaaaatggatttgtatgtgttgagactggcagaagatggaccagcaataaggaatgggaggatgagggtaggagatcaaatcattgaaatcaatggggaaagcacaagggacatgacacatgccagagcaatagaactcatcaaatctggaggaagacgagtgaggctgctgctcaagagaggcacgggacaggtcccagaatatgacgaacccgccccctggagttctcccgctgccgccgccccaggtctgccggaagtaggcgtctccctggacgacggcctcgctccattctctccatcacatccagccccaccctccgacccttcccaccagataagcccaggcccaacttgggatatcaaacgggaacacgacgttaggaaaccaaaggagctttcagcctgcggccagaagaagcagcgcctcggggagcagagggagcgctcggcgagtccgcagagggccgcgcggccgaggctcgaggaggcgcccggcggccaggggcggcccgaggccggcaggcccgcctcggaggccagggcgcccgggctcgcggcggcagacgcggcggacgcggcgcgggcgggcgggaaggaggcgccccgtgcggcggcgggctccgagctctgccggcgcgaaggcccgggggctgcgccggcgtttgccggcccgggcggcggcggcagcggcgcgctggaggccgagggcagggcgggtgcgcgcgcgggtccccggccgggcccgcgacccccggggggcgccccggcgcgcaaggccgccgtcgcgccggggccctggaaggtgccgggttctgacaagctgcccagcgtcctcaaacccggcgcctcggccgccagcagatgagccgcgcggccacggccaacccgcccgccccggcgcaggcagttcttcttaggttccgtctcacggcgttttaatttattttcactgtcacacgcatagatccacgaggcaccaaggcctgggagcatcgacgtgaagtcccacgtgtccggtgtgcttgggcggcatcgcatcaacgcgcagacctaaactgatcctaaagcccccggttcccttgtgggggctttggcagctatggaagaaccaaaataacgtgaagaacatcacagagagacagtgcagtgtagctttagtttaagaaaaaaaaatattcctccccactgcatgaaggacttggatgtcatccaaactttatatcaagaaacaggacaaagttaagagcaatcacaaactggaatatcgccttaaaaatcaaactgcacggagcaagctgaaactgagacaagattatatcttttaattgatctaaagcgttgtaaataaattgttctcgacatatctagacaggggttaaagggtttctttgacacattcggaaccgttcacccatgacatgtttccatggctcacccttggcatccatcctcggtgttagcagcagcgttccctgcctcctgcaggatgacttagaaatctagtgagtttcttggtgtgatgccatttttattgccctttctgtgatcaaatcatatttctgtacattttcagtggtagaaaaaaaaggttttaaaaattgtatcctagggaacagtttgccataagtcagaattttgcagtttagctcatagatcttaattggtttttctctaaaatatgaattttataattgaaggaccacaatttgtttaatcaagataggcaacgctgcagttcctttatgaagaggcttttctgtcgtcccaggctagcagagatggatagcttctttgtcagcaatgtgatttcacttattttattgtcttattttaaaccctgtctccatgacttcatttgcactttgacagagcagaggcagagtatttgtcttatatttctcagattataatattaaaaaattacaatcaatttattttcattaaagaacgtgagtctttttagcattcctttctgcttatccttctttccttaccctttgtccttttgtttccattagttttctttcgtcttgtattccttgccactttattttgttagcaacttctagatgtttatcttcatggatctatgattgacctcctagtaaaattctaagtcttgcctttcttccctgctgttttagcatttctttgtaaaatgttagcttcaattaattagccattggtacttactgtagctacacatattaaaaggcaaagtgtttctgaaggcaatttctttttaatatgcccgaatgaatgaggcttcatcctttccatattcttactctttacaggagttcaaatgcaaataagctccacctccctgcacttgtagtctaaaaagtaaaaggggcgatcaggtccatctcaaaggtcacacgtaatagcctccctgggctgatcattccctctccttgtaattgcagtatcctgagtagcagtttaattttcatcaaacatcggagtagtttagttgtttgacaggaggagaataaggctgaaagcctcaagtgaaggatcttgcagcttgtaaaagcaatttccaaaaatgaaacccattcatcgtaaacaaaagcacaaacacttgtagcagtttataatgcttttggtttaatctcaattagtctttctcccctggactagaaatccagtatagtttgccattaatttattgaatctggttttggacaatgcttctgtagtgtagctgcacgtcctggtactgtatcctctgactttattttccatgtattacaaaaggaaaaaaaaattgagattacactggcataaactctagtttgcacagttcacagctactacttgtgcagtaattgctttatgcggctgtaatccataacctgtgaagacagcacatcatctaaatcccattccaaataatatttgtgtagtgttagctgtgaatttaccctgtacagctgtatctctataaatataattccatgtattaatagtcacagaaagactgtaagtgagcaactatttttatgaaacgtaccactatggataaattaacttttacagaaatcttgtttactgtatgatattctaaaacactgtcaaataaaatatatatcc

SEQ ID NO: 94 - DNA, 3301 bp, Homo Sapiens
atgcacaggcctgggcagggacacacaaccaacagctctgtcgggaacttaggagcctgctcgcctacaaaaatgataagagagatctaaagaaaacaagctaaaccttttgagggacatactgaagccagataacccaaggtattcacagcaagatacagtgagtcttaaagttaagcaccgtgcaattagctttgcttccttgggtttttgaaacatgcatctgtataaacctgcctgtgcagacatcccgagccccaagctgggtctgccaaaatccagtgaatcggctctaaaatgtagatggcacctagcagtgaccaagactcagcctcaggcggcctgcaaacctgtgaggcccagtggagcagccgaacagaaatatgtggaaaagtttctacgtgttcatggaatttcgttgcaggaaaccaccagagcagagacgggcatggcatacaggaatcttggaaaatcaggactcagagtttcttgcttgggtcttggaacatgggtgacatttggaggtcaaatttcagatgaggttgctgaacggctgatgaccatcgcctatgaaagtggtgttaacctctttgatactgccgaagtctatgctgctggaaaggctgaagtgattctggggagcatcatcaagaagaaaggctggaggaggtccagtctggtcataacaaccaaactctactggggtggaaaagctgaaacagaaagagggctgtcaagaaagcatattattgaaggattgaagggctccctccagaggctgcagctcgagtatgtggatgtggtctttgcaaatcgaccggacagtaacactcccatggaagaaattgtccgagccatgacacatgtgataaaccaaggcatggcgatgtactggggcacctcgagatggagtgctatggagatcatggaagcctattctgtagcaagacagttcaatatgatcccaccggtctgtgaacaagctgagtaccatcttttccagagagagaaagtggaggtccagctgccagagctctaccacaaaataggtgttggcgcaatgacatggtctccacttgcctgtggaatcatctcaggaaaatacggaaacggggtgcctgaaagttccagggcttcactgaagtgctaccagtggttgaaagaaagaattgtaagtgaagaagggagaaaacagcaaaacaagctaaaagacctttccccaattgcggagcgtctgggatgcacactacctcagctagctgttgcgtggtgcctgagaaatgaaggtgtgagttctgtgctcctgggatcatccactcctgaacaactcattgaaaaccttggtgccattcaggttctcccaaagatgacatcacatgtggtaaatgagattgataacatactgcgcaacaagccctacagcaagaaggactatagatcataaggcaatgcatgaaccacagaagctgcatggttaaaatagcggcctgtgcccagtacagaaaggtgttactaaccagtcttttgaatcacttagcagcttgctgctcaacctctagtgtccctccctggattctttgaggtgtctgctgtcgctaccactgtgcacatctgaaaactcacaaccaagaaaatccattctattttcttatcttggactggagtcacctattcttgcattgctgtatacacctcatgcttatgcaatgggaagaatatgggggccagggggtgtggtactaccttcaggcatttggtaactcaaagaaggctgtacagatatattttttcaaaagaacaaaatccacagatgcaatgtgagttgcgtaagaaacagagtagatagactaaattcagtgaaggaaaggaattgagagatttttcttagtaaatagattattgttaagtaaatagttattaaaaatatatctcactgcaaaaaaaaaaaagcagtatcttcactcaaaagtcttgcttggaagaataagcagaaataattttatatattttttttctattttcacattcatactaacaagttttgttccatttgttattcaataaaacaaaaatttctaggtatttgctttattacctttcaaatatttactgttgcttggccccaagaatggccttgtacaacttatccagaatgtctattaggattctaatgttatgtccacttacaagtagagacagtaaaaggatgaatacccaatctttagtgacaatgcagctgatttatgaaagagagggctacactgctatggaaacttagcttcaaagaaaatgcaatgtatctgcaattaggtgttcattttttactacattttattaaaacctgctttatactttcaactgcttgtaggcacaacttctgcaagtttaaatatttgagctttacaaataaacatacacatgctcagttttttaagtaaacctgtaaaatacccaggaaggcaaatgttcattgtttaattagcactgggattttataatataatgtttggtatttttgaggcattgttaacatgaaagtcaaccactggctttgtgaaaaatgctatgtcactattcagaatatgctgggtaaattgacttgcctagtgaaaagcaaaatgttaaagaaagaacttctggttctataatcatattatatgcactaaactatatgcatgaaagttctttgcatggattaatggggcttacccttgttgcactcgaaatctgaggtgtatctagccctgccactattggctacttaccctcattaatatcccacttgagaaaaattgtgagactatactgtgtcaatatctgtaaaaagagagaaaacatgttttgtttttttttgaagggggtggtgtgggagtggccctttaactctatttggctatctgaggatgtacaaaattctcatttaattttctggtcagcaagttccccacacagaaatcactctgaggtttacagaagaactgtaatattattttaaaatgcgatttttctgtcattagttctagatatgtacttcatggttaaattctaaatctgaaaatgctagtgggagatatcaagaaattttctttttgattactagtacctgtattctaacagagagtttgaattttttgcccgtgttatcagaatgatggaaattgatcattttcagttgttcattgtgtattcaatccagcgaactgctgtatgtatagaggagctgaggtgctgtctaatgggaaatgtgatttgattgatttatttgcttagagtaataaaagcattttgtgcattcaatctt

SEQ ID NO: 95 - DNA, 2310 bp, Homo Sapiens
gcttcaatgccacggcctgaccggagtatccgccatggagtcgcagaaagaggcacgaacactccaggagcccgttgcgcggccttctggggcctcaagctctcagacgccgaacgacaaggagcggcgggagggcggcgcagtgccggcggcggctgccctgggcgcagaggcggacgacgacagtgcggacgggctgtgggagctgccggtggagccggccgagcggaggcctgagtgcacccgctgcagccggcctcagaaagtgtgtttgtgtccatttctcccagcgcaccctctgcatatctctacccacttgtacataattcagcatccagcagaggaaaacaaagtgttgcgtacagttcctctactagcagcatgcctcccccaggacaagtgtaaagtgaagatcggtcgtcgcttcagtgaagaaagagatcctgaactttcaactgtttgccggaagtctggtacattaatattatatccaggggctgaagctgctaatttggaagaatttatattagattctcctgtttatccttctacaatcatcatcattgatggtacatggagccaggctaaggacattttctataagaactccttgttccgacatcccaaacaggtgcaattaaaaactagcatttctagtcagtatgtaattcggatgcagccgactaatagatgcctttctacactggagtgtgcagctgttgctctttccatcttggagaaaaataattacatacaagagactttgcttcgccctcttcaagctttatgctcctttcaacttcagcatggtgcccaaattcgcctcagcaaggaacaccttctgaaaaatggattatatcctaaaccaatgccaaagaacaaacgcaaactcaggaaaatggaattgttaatgaatagtgttaaaatttagtacagttattcttttggtgctagcttaactgtcttcatctaacaataccaaattaagttttcatatagttaaggtctgtaggtttttgacttgctaaagaagaatgagaattgcatactaatcttacccagaagaaggaagtaaaccaaatattcataaatacaaataaacagaaattcactggctcactgaaaagcaggatttcctactgtacttgtttttaaaaatgtgcctctaatacatgttttcaaacccaaatttaaaatatgatttgttgttgtgataggttagaagttcttacttgtaaaatagaagaaaattgttgtagtggattggaacggtgttgtgtccattaatgtttataaataattaggtgtagaccaataatataagattcctacatcagtttgcagtcctgactttacagtttgaaataagtagcaaaagaaaattatgataatcaagtaatttattattttgtaaaatagtataaaggaataaggaaattttaagtattgtttaggggccaaatttgaactcagctaatatgatttaagcgctctattaattgccctgatttttaaagaggtgcatgtaattttgaaatagcacacattttcatttgtaatcactctggataaatttgtatttttcagtgttcattgaacaggcttattgactctggtaaacttattttattgatgttttcatatggaaaataataagtggaatatgatacaattgttattttcagaacatatttctttagggctatttaatataacctttttaacgagcaaaaactttccatttgagagaaaaaattcttcctgctctgtgggaaaatatttgctgagattttgtatagaataagagacatgtatgtaacatatatgtatattcagcacaagtctactgcaattatgtacacattttggcaagaagaggggattttgtttagtctttgtttatgacttctagagtttcctgtatctagtgttaagttgtaaggaaaaactaaacatgccatttaaaggtaaacttggtaactatttatagagcatacaccaatgattatttctcacagttttcatgatcatttgtttattatttacttggattagactcattaaaaggtataatgctggtcacaattagaatgctaatatttggggaaactatgcagaaaatattttaaaatattaaaagagtgctggcttctattgttgatttatttttggatttaaaaacaaattagggctgggcccattagctcacacctgtaatcccagcactttgggaggctgagatgtgagaattgcttgagcccaggagtttgagaccagcctgggcaatatggtgagactccatctccatac

SEQ ID NO: 96 - DNA, 1605 bp, Homo Sapiens
ccagtcctgccgcccggtaacaaaaccggggttcccgccacacgcacccggtagggctcaggacgctttatcggcgacaatggctggctgaatgggaggcctgaggtcctgaaggaaccgggggtgctggcgaccgggacctcgaggccgctgctggggaggacgctggccagcgtgcagggggcggaggcggggcgtgccgggaggctcccatctcccgccccgcacaacccgggcagggccgccgctccgccgccgccgcagatccggctctcaccctcggctcccgaggccccgcggcgcctccttctgcggactctgcgggaccctccccggcaggcgctgtgccctggagaaggcacagtggctcaggcatggccgcggggacggcggcgcggaaggcagcgccggtgctggaggcccccccgcagcaggagcagctctctcatacaaagctttctgcagaagacacatggaacctgcagcaggagaggatgtacaagatgcaccggggccacgattccatgcacgtggaaatgatcttgatcttcctctgcgttctggtcattgcccagatagtgctggttcagtggagacagaggcatggccgatcctacaatctggtgaccttgttgcagatgtgggttgtccccttatatttcacgataaaattatactggtggcggtttctgtctatgtgggggatgttctccgttattaccagttacatcctcttcagagctacccgaaaacccctctcaggaaggacaccacgattggtctacaaatggtttcttttgatctacaaactcagctatgcatttggtgttgtgggttacttggcgatcatgtttacaatgtgtggattcaatctgtttttcaaaatcaaagctagagattccatggattttggcattgtgtctttgttctacggcctctactatggagtaatggggagagactttgccgagatctgctcagactacatggcttccactatagggttctacagtgtcagccggttgcctacaaggagcttatcggacaatatctgtgcagtctgtgggcagaagatcattgtggagcttgatgaagaagggctcattgaaaacacctaccagctttcctgtaatcatgtctttcatgaattctgcatccgaggttggtgtatcgttgggaaaaagcagacttgcccttactgcaaagagaaagttgatttgaagaggatgatcagtaatccctgggagcgcacacattttctgtatggacaaatcctggattggcttcgttatttggtggcctggcaacctgtggtgataggaatagttcaaggcattaactattcactagggctggaataggacagcagaccccagaagcaacatactgcatggttgaaatccttggtccaacatttaatattaatttttttaattttagagatgatcccaagtgtttagaaaactaagtaaactttgttgtcaagcaatttgtccatgtggaaagaatttaaagagaagctgaacaatggaataaacaaataaagcatgttttttcatctttcccattaaaaaaaaaaaaaaaaaaaaaaaaaaaaaaaaaaaa

SEQ ID NO: 97 - DNA, 2176 bp, Homo Sapiens
agagccctctcgcggccgcggcggcagcagcagcgccagccccagcaacactgaggccgccgccgccgcctggcgctcccgccgcccggcccgacatgagtgaggcggttcgggtaccctcgcccgccactccgctggtggtggcggcggccgcgcctgaggagaggaaagggaaggagtcagagcgcgagaagctgccgcccatcgtatcggcgggcgccggcgcgaccgcgggtttggacagaggagccaaaggccaaatttccactttcagcagttttatttcagctgttagcccgaagaaagaagctgctgaaaacagaagttcacctgcacatcttgttttccctaacatcaagaatgtgagagaaccaccaccaatttgccttgatgttagacaaaaacagcgtacatctatggatgcatcatcatccgaaatgaaggccccagtccttccagaacctattcttcctatccagcccaaaactgtgaaagactttcaggaagatgtagaaaaagttaagtcatcaggagattggaaagcagtacatgatttttatctaacaacgtttgattctttcccagaattaaatgctgcatttaagaaagatgccactgcctcatttaacaccattgaagactctgggattaatgctaaatttgtgaatgctgtgtatgataccttacttaatactgtaagtattatgacatgcaagtaatattattctgtgtctcttctgtatatcaaaagcagccatacaaatattgtaaaaatcaccttataattaccttagaaactctgatacaattttatagtaaatgtagctggaattctcataaagttagattattttattcttttattttttaattatgaattaagcagcaaatacttttatatccaatccttttttagaaagacttgctaaaatcatgctttacttactcagcaaaaggaggtaagttatttaattatattggaattacactgaatctgtagatcagtggttcttaaacattagcctgtatcagagtcacaagaagggcttgttaaaatacagaatttcagattcagtaggtcttgggtgaagcccaagaattttcatttgtaacaagttcccaggatatgttgatttatgagttcatttatgatgtgacacatactataaaaattatgtcaccattcaaaaaatccagatgcatatttgaaggactaagtgggaatgataaagacagaatgtaaacaaagtctccagaagtttagctatgaagtgaaagacatgttaagaatgaccacattttgagaaccatactgctatagatcaatttgtgaaaaattgacatcttttcaatccataagcatactgtatccttttaggtacctaggtcttctttaatttctcttggtaatgttttgtagttttctggatagaggtgttacacatttctcattacatgtatttctaggtacttcattttttttatcctattataattttattttccaattgtgactaatatatggaaatactttcatatatttatctttatctaaatacagttgacccttgaacaatgcgagggttaggggcgctaaccccctatgcagtaaaaaaaaaaaatctgtgtataacttttaactccccagaagcttaactactaataacctattgttgaccagaagtcttactgataacataaacagtcaattaacgtatattttatgttatatgtattctatactatattgttacaataaagtaagctaaggaaaaggcaatgttattaagaaaaaataaggaagataaaatatatttactatatattaagtggaagtggactatcataaaggtcttcatccttattgagtaggctgaggaagaggaggggttggtcttgctgtctcaggtggcagaggtgaaagaaaataatgtatataagcagacttgcacaattcaagcctgtattcaagagtcaactgtactttgctatattcatccattaattctaatagtacatcagtaaattaacttggattttctgtgtacacaatcttgtcatttgtgaaaaaggagagttttatctccttctaatcctgtatcttatatggatatatgtatgtgtttgcattgactgggacctctttcacaattgtgaataaaagaagtaatagcag

SEQ ID NO: 98 - DNA, 2542 bp, Homo Sapiens
gaggagggacctacaaagactggaaactattcttagctccgtcactgactccaagttcatcccctctgtctttcagtttggttgagatataggctactcttcccaactcagtcttgaagagtatcaccaactgcctcatgtgtggtgaccttcactgtcgtatgccagtgactcatctggagtaatctcaacaacgagttaccaatacttgctcttgattgataaacagaatggggttttggatcttagcaattctcacaattctcatgtattccacagcagcaaagtttagtaaacaatcatggggcctggaaaatgaggctttaattgtaagatgtcctagacaaggaaaacctagttacaccgtggattggtattactcacaaacaaacaaaagtattcccactcaggaaagaaatcgtgtgtttgcctcaggccaacttctgaagtttctaccagctgcagttgctgattctggtatttatacctgtattgtcagaagtcccacattcaataggactggatatgcgaatgtcaccatatataaaaaacaatcagattgcaatgttccagattatttgatgtattcaacagtatctggatcagaaaaaaattccaaaatttattgtcctaccattgacctctacaactggacagcacctcttgagtggtttaagaattgtcaggctcttcaaggatcaaggtacagggcgcacaagtcatttttggtcattgataatgtgatgactgaggacgcaggtgattacacctgtaaatttatacacaatgaaaatggagccaattatagtgtgacggcgaccaggtccttcacggtcaaggatgagcaaggcttttctctgtttccagtaatcggagcccctgcacaaaatgaaataaaggaagtggaaattggaaaaaacgcaaacctaacttgctctgcttgttttggaaaaggcactcagttcttggctgccgtcctgtggcagcttaatggaacaaaaattacagactttggtgaaccaagaattcaacaagaggaagggcaaaatcaaagtttcagcaatgggctggcttgtctagacatggttttaagaatagctgacgtgaaggaagaggatttattgctgcagtacgactgtctggccctgaatttgcatggcttgagaaggcacaccgtaagactaagtaggaaaaatccaagtaaggagtgtttctgagactttgatcacctgaactttctctagcaagtgtaagcagaatggagtgtggttccaagagatccatcaagacaatgggaatggcctgtgccataaaatgtgcttctcttcttcgggatgttgtttgctgtctgatctttgtagactgttcctgtttgctgggagcttctctgctgcttaaattgttcgtcctcccccactccctcctatcgttggtttgtctagaacactcagctgcttctttggtcatccttgttttctaactttatgaactccctctgtgtcactgtatgtgaaaggaaatgcaccaacaaccgtaaactgaacgtgttcttttgtgctcttttataacttgcattacatgttgtaagcatggtccgttctatacctttttctggtcataatgaacactcattttgttagcgagggtggtaaagtgaacaaaaaggggaagtatcaaactactgccatttcagtgagaaaatcctaggtgctactttataataagacatttgttaggccattcttgcattgatataaagaaatacctgagactgggtgatttatatgaaaagaggtttaattggctcacagttctgcaggctgtatgggaagcatggcggcatctgcttctggggacacctcaggagctttactcatggcagaaggcaaagcaaaggcaggcacttcacacagtaaaagcaggagcgagagagaggtgccacactgaaacagccagatctcatgagaagtcactcactattgcaaggacagcatcaaagagatggtgctaaaccattcatgatgaactcacccccatgatccaatcacctcccaccaggctccacctcgaatactggggattaccattcagcatgagatttgggcaggaacacagacccaaaccataccacacacattatcattgttaaactttgtaaagtatttaaggtacatggaacacacgggaagtctggtagctcagcccatttctttattgcatctgttattcaccatgtaattcaggtaccacgtattccagggagcctttcttggccctcagtttgcagtatacacactttccaagtactcttgtagcatcctgtttgtatcatagcactggtcacattgccttacctaaatctgtttgacagtctgctcaacacgactgcaagctccatgagggcagggacatcatctcttccatctttgggtccttagtgcaatacctggcagctagccagtgctcagctaaatatttgttgactgaataaatgaatgcacaaccaaaaaaaaaaaaaaaaaaaaaaaaaaaaaaaaaaaaa

SEQ ID NO: 99 - DNA, 2319 bp, Homo Sapiens
ttttcagctgtggagtttgggatctgagcttggagcccatttgtttctggcagttccgctcatattttccacttgaagacatcgcctcccttccttccaagctgggagaccagaagtcaacaacaggagggtggagaggccgggtctcacaatccgcttggctggggagtccactgaggttcttgcatcctgaagcaaaccatggagagctggtggggacttccctgtcttgcgttcctgtgttttctaatgcacgcccgaggtcaaagagactttgatttggcagatgcccttgatgaccctgaacccaccaagaagccaaactcagatatctacccaaagccaaaaccaccttactacccacagcccgagaatcccgacagcggtggaaatatctacccaaggccaaagccacgccctcaaccccagcctggcaattccggcaacagtggaggttacttcaatgatgtggaccgtgatgacggacgctacccgcccaggcccaggccacggccgcctgcaggaggtggcggcggtggctactccagttatggcaactccgacaacacgcacggtggagatcaccattcaacgtatggcaatccagaaggcaatatggtagcaaaaatcgtgtctcccatcgtatccgtggtggtggtgacactgctgggagcagcagccagttatttcaaactaaacaataggagaaattgtttcaggacccatgaaccagaaaatgtctgaagatgttaagatcccctgattactttgagaaaaacaactaaaacaagaaccgtgtttatcactgttgtggagatttccttttattcttgacacaatttgatgacctaaagtgtgttttcttctgtgtaaagtacatgagctgcctcactaagcattcccaactcattgaatgtgatgtggttataaagataagttaggcagctagaccctgcgttctaaaaaaggattgcttgcaatgttggtttggctattcatttgcacaaagagactgtggctctctgttgtgagatcttcagctacctcatggtgcaataacacacacacgcttaaccatgttgatggcacaaagcggtgagcagtagggaggtagaatatcttggtggggaggggatgttatcagcttctgggagatgaagaatattgttgaggttccaaagatgctggacctgtgctaaattcttcagtgatatgaaaaaatcattgagcattcattattgcgaatgaagtggggatgcattatttctgacacccacaagcagggtttgatcatcctttcagctttgagatatctgcacataaaattattattacctgaagaaaataaggctgcattttgaaatgttaagtgcaaaatgactgatgttaaaaccatctgggggaaatcttgggatgctttttcctaggaaagcatatggttgtgatatgttttggcgcataggagacagaaatagtgattatcaggcgttgagcctttttgtagtatttttagtctttgatactctgtaagtactagttcctaaggcaccaacattgcattccttggtttatactttttctattcatcagggtaggaaatcttaaatccttaggcatccaagaagtatactagctttttgcttctcttttagaaatacttgtggggagagaaaaaaggatggtttgggcatattggtatagtttgagtaaactaaggttaatgttcatataacatttagactttgccataaatatcagaaccaaagatcaagacattcatgtacagtctggaatgtatatatggggcccataaaaattcccagtatgcatgttttatgctcaccattatgaattggggtcttcaaagagagaaggttgaaagtggaaagcacttgaaagggctccccggtttgtaaaatatctttaatcattcacattaggtacctcggagttgcgggtctcagatgtggattcatgcatcatttgtgcaatttgaagatagtccatatttcctatttcagtattaggtcctgcaacacttttcaattcttgtagaaggtttttttcaggagtggtgatgtctgatgctcaattactattttccctataagagtttcagcatgagcttaattaaattttgtgaaaaaacctgtgtttttagttacatacacacacacacacacacacacacacacacccctacttaaatggaatctaaacatttttagcctttaatccattccattttctaaaactgtcataaactatttttaatcattttaaataaatgtaaaagaaaaataaaaaaaaaaaaaaaaa

SEQ ID NO: 100 - DNA, 3278 bp, Homo Sapiens
agttcagtttagaaactgccagtcttggtatagaacaacctaggcttatctgtttaagtcccataggtagtattattagagaataacccaggctttgggaactgtataactctgagatcgtttgaaattttcgttttgtttttcttttggctccaaccaggcctctgttgttagactaatggggtttcccctgcagagattggtcagccctgcagtctatcatcccggaaggtgttaaatacacatgaaagccagcctcggcgggcagaacctagcccgccgaaagggcgggcattgctaaagtgttttcaaaaggtcttcccaatcctctgctttagacagctcggaccttagatagaagaacacaacggatcctccagtgactgacgacccaaaggacggatgatgtcacagtcatctggatcaggagatgggaatgatgatgaggctactacctctaaagacggtggtttttcttcccccagtccctcagctgctgctgctgctcaggaggtcagatctgccactgatggtaataccagcaccactccgcccacctctgccaagaagagaaagttaaacagcagcagcagtagcagcagtaacagtagtaacgagagagaagactttgattccacctcttcctcctcttccactcctcctttacaacccagggattcggcatccccttcaacctcgtccttctgcctgggggtttcagtggctgcttccagccacgtaccgatacagaagaagctgcgttttgaagacaccctggagtttgtagggtttgatgcgaagatggctgaggaatcctcctcctcctcctcctcatcttcaccaactgctgcaacatctcagcagcagcaacttaaaaataagagtatattaatctcttctgtggcttcggtgcatcatgcaaacggcctagccaaatcttctaccaccgtctctagctttgctaacagcaaacctggctctgctaagaagttagtgatcaagaactttaaagataagcctaaattaccagaaaactacacagatgaaacctggcaaaaactgaaagaagcagtggaagctattcagaatagtacttcaattaagtacaatttagaagaactctaccaggctgtagaaaatctctgttcttacaagatttctgcaaacttgtacaaacagctgagacagatctgcgaagatcacatcaaagcacagattcatcaattcagagaggattcattggatagcgttctttttttaaagaagattgatagatgctggcaaaaccattgcagacaaatgatcatgatcaggagcatttttttgtttctggatagaacttacgttcttcagaattcaatgctaccctccatttgggacatgggactggagttatttagggctcatattataagtgatcagaaagtgcagaataagacaattgatggcattcttctcttgattgagagggaaaggaatggtgaagcaattgatagaagtttacttcgaagccttttaagcatgctgtctgatttgcaaatttatcaagattcttttgaacaacgatttttggaagaaactaaccggctctatgcagctgaaggccaaaaattaatgcaagaaagagaggttcctgaatatctacatcatgttaacaaacgtctagaagaagaagcagacagacttattacttacttagatcagaccacccagaagtcattaattgctactgtagaaaaacaacttctaggtgaacacttaacagcaattcttcagaaaggtttaaataacctccttgatgaaaaccgaattcaagatttgtctcttctgtatcagctcttcagtagagttcgaggtggagttcaggttcttttgcagcagtggatcgaatatatcaaggcatttggcagcactattgtaattaatcctgaaaaagataaaaccatggttcaagaattgctggattttaaagataaggttgaccatataattgatatctgctttctgaagaatgagaaatttatcaatgccatgaaagaagcatttgaaacgttcattaacaaaagaccaaataaaccagctgaacttatagctaagtatgtagattcaaaacttcgtgcaggcaacaaagaagctacagatgaagaacttgagaaaatgttggataaaattatgatcatatttagatttatctatggcaaggatgtttttgaggccttctataagaaagatttagccaagcgcctgttagtcggaaagagtgcatctgtagatgctgaaaaatcaatgctgtccaaacttaaacatgaatgcggagctgctttcaccagcaaacttgaaggaatgtttaaagacatggaactttctaaagacatcatgattcagttcaaacagtatatgcagaatcagaatgttccgggaaatattgagttaactgtgaatatcctgacaatgggctattggccgacatatgtgcctatggaagttcatttaccaccagagatggtaaaacttcaggagattttcaagacattttacctaggcaaacatagtggcaggaaacttcagtggcagtcaaccataggacactgtgtgttaaaagcagaatttaaagagggtaaaaaggaactccaggtctctctttttcaaacactggtgctgctaatgtttaatgagggagaggagttcagtttagaagagatcaagcaggcaactggaatagaggatggagagttaaggagaacactgcagtcattagcctgtggcaaagctagagttctggcgaaaaatccaaagggcaaagacattgaagatggtgacaagttcatttgtaatgatgatttcaaacataaacttttcaggataaagatcaatcaaatccagatgaaagaaacggttgaagaacaagcaagcactacagaaagagtatttcaagacagacagtatcaaattgatgctgcaattgttcgaattatgaagatgagaaagacacttagccacaatctccttgtttcagaagtgtacaaccagttgaaatttccagtaaagcctgctgatcttaagaagagaatagaatctttaattgaccgggactacatggaaagagataaagaaaatccaaaccagtacaactatattgcatagaatgttggccttgcagcatttggtgtcatatgcagtagccagtggataaactaacctgttgattcaatattatttgactccttttttactaccgatgaccaaatgaagcagtgtaattaaaaaaaaaaaaaaaa

SEQ ID NO: 101 - DNA, 7984 bp, Homo Sapiens
cggcccggcggtaggcggtggcgactctgcccgctcccgtttcggcgcggtgaccgagcgcccgggaggctcgaggaccgcatcgtgtgccgttgcgccaagcccggtcctgcgccgccatggccccagtgcagctggagaaccaccagctggtcccgcccggaggcggcggcgggggcagcggcggacccccgtcagccccagcccctcctcccccgggagccgccgtggcggcggccgctgcagctgcggctagcccgggctaccggctgagcaccctcattgaatttctgctgcaccgggcctactcggagcttatggtgttgacggacctactgccaaggaaatctgatgtggaaaggaaaatagaaatagtgcagtttgctagccggacacgccaactcttcgttcgattattagctttagtgaaatgggctaataatgctggcaaagtggaaaaatgtgcgatgatttcaagctttttagatcagcaagccatcctgtttgtggacactgctgatcgcctggcctcgttagctagagatgctctggtccatgcacgcctgcctagttttgccatcccatatgccattgatgtactaactactggatcttacccacggctgccaacctgcattagggataaaattattcctccagacccaattaccaaaattgaaaaacaagccacactccatcagctgaatcagattcttagacatcggcttgtaaccacagatcttcctcctcagttagcaaatcttacagttgcaaatggccgggtgaagtttcgtgttgaaggagaatttgaagccaccttgactgtgatgggagatgaccctgatgttccatggcgtcttctcaagctagaaattctagttgaggataaggaaacaggagatgggcgagctttggttcatagcatgcaaatcagcttcatccatcaactggtgcagtctaggctctttgctgatgagaaacctcttcaggatatgtacaactgcctacattctttctgtttatcacttcagttagaagtgttacattcccaaactctaatgttaatccgagaacggtggggagaccttgtgcaggtggaaaggtatcatgctggaaagtgcctctccctttcagtttggaatcaacaggttcttgggagaaaaactggaacagcatctgttcacaaagttacaattaaaattgatgagaatgatgtctccaagcctttacagatttttcacgatcctcctttgccagcttctgattccaaattagtagaaagagccatgaagatcgaccacttatcaatagaaaaactcctgattgacagtgtccatgcaagagctcatcagaagctccaagaactgaaggccattcttagaggcttcaatgccaatgaaaactcttccatagagactgcactcccagctcttgttgttcccatcttggagccctgtggtaattcagagtgtctgcacatttttgtagatttacattctggaatgtttcaattgatgctttatggacttgaccaggccactctggatgacatggagaagtctgtgaatgatgatatgaaacgaatcataccctggattcagcaacttaagttttggcttggacaacagcgttgcaagcagtctataaaacatctgcctacgataagcagtgaaacattgcagctttccaattactcaactcatcctattggaaacctttctaagaataaactgttcattaaacttacccgccttccacaatactacattgttgtggagatgttggaggttcccaataaacccacacaactgtcgtacaagtactactttatgtctgtgaatgctgcagatcgtgaagacagccctgcaatggcattgctgctgcagcagttcaaggaaaacattcaggacttggtttttcgtacaaaaaccgggaaacagaccagaaccaatgccaagcgcaagttgtctgatgatccatgtccagtagaatccaagaaaacaaaacgagcaggagaaatgtgtgccttcaataaagttttagcccacttcgtcgctatgtgtgatacaaatatgccatttgtaggacttcggttggagttgtccaatctggagattccacatcaaggagtgcaagtggaaggtgatggcttcagccatgcaattcgcttattaaaaattcctccctgtaagggtataactgaggaaacccaaaaggctctggaccgctctcttcttgattgcactttccgattacaaggtagaaataaccgcacttgggtagcagagttagtgtttgcaaattgtccacttaatggcacttctactagggagcaaggaccatcccggcacgtttacctgacatatgaaaatctgttgtctgagcctgttggtggtagaaaggtggttgaaatgtttcttaatgactggaatagcattgcacgattatatgagtgtgtgttggaatttgcacgttctctaccagacatacctgctcatctaaatattttctcagaagttcgtgtttataattaccgaaaacttatcttgtgttatggaaccaccaagggaagctcaattagtatccaatggaattcgatccatcaaaaattccacatttctttgggaactgttggcccaaactcaggttgcagtaactgtcacaataccattctccatcagcttcaagaaatgttcaacaaaacaccaaatgtggttcagttattacaggtactgtttgatactcaggctccattaaatgccatcaacaaactccccactgtgccgatgttgggcttgacccagagaaccaatactgcctaccagtgcttctccattctgccacagtcgtccacccacatcagactggccttcaggaacatgtattgcattgatatatactgccggagtcgaggtgttgtggcaatacgggatggtgcctatagtctttttgataacagcaaactagttgaaggtttctatcctgcaccaggactaaagacgttcctgaatatgtttgttgacagcaatcaggatgctcgaagaaggtctgtaaatgaggacgataatcccccttctcctataggaggagatatgatggattctttaatatcgcagctccagccaccaccccagcaacagccatttccaaagcagccaggaacatcaggtgcttatcctcttacttcaccccctacatcttatcatagcacagtcaatcagtctccctcaatgatgcacacacagtctccaggaaatctgcatgctgccagctcccccagtggggctttgagagccccatcaccagcgtcatttgttccaactcctcccccatcctcgcatggaatctcaataggaccaggggccagttttgctagtccacatggaactcttgaccctagttccccatacactatggtgtcaccaagtggacgagcagggaactggccaggatctcctcaagtgtctggcccctcaccagcagcacgcatgcctggaatgtcaccagccaacccctcactacattctccggttccagatgcttctcattcccctcgagctggaacaagttctcaaacaatgccaacaaacatgcctccacctcgtaaactacctcagcgctcttgggcggcatccatacctaccatcctcactcacagtgccttgaacattttactgctgccctctccaactccaggccttgtgcccggcctggcaggtagttacctttgttctccacttgagagattccttggatcagtcatcatgagacgacatcttcaaagaattattcaacaagaaacgctgcagctgataaattctaatgaacccggagtgatcatgtttaagactgatgcactgaaatgcagagtagctcttagtcccaaaaccaaccaaacgcttcagctaaaagtgacacctgaaaatgcaggacagtggaaacctgatgaacttcaagttttggagaaattctttgaaacaagagttgcaggaccaccatttaaagctaatacgttaatagccttcaccaagctattaggagctcctacacacatcctcagggattgtgtgcacattatgaagctggagctgttccctgaccaagcaacacagctaaaatggaatgttcagttttgcctgacgatccctcccagcgcgccgccgattgcacctcctgggacgcctgctgtggtgctgaaatccaaaatgctattttttcttcaactaactcagaaaacatcggtccctccccaagaacctgttagtattatagttccaatcatttatgacatggcttcaggtacaacccagcaggcagacattcccagacagcagaactcttctgttgctgctcccatgatggtcagcaacattctgaagaggtttgcagagatgaatccaccacgacaaggtgaatgcacaatatttgcagctgttcgtgatttaatggctaatcttacactgccccctggtgggcgtccatagacactattgtttttaaaccaggaaggctgacagatgagacaacaaaaaaaatctgaattcagccttcagtttaaaaaaggaaaaggactttttttttaaactttaagagctaaatattctaaactggcaaaaattttcagggtgcacttctttcatcaaaatgatcatccatcttttgtataatgaacttgtatagtgtgtttaaatgggacacatttcaaaggaaataaatcagtgtccgtttgccagtaataaatttaatattctgttttatactataaagttatgaaaatgccaaacttgtttatttaattgttttcttatgttttgggtgtaatagtccttttttggtttttgttttgttttttaaggcaggtctgtcatttttgaatactgtaaaactgtgataaactttatattgaagctgtattttaatatgaccgctttgaatccttacatgaaatgttctgggagttgttataaacacaccccaaggaagcaatatttaataaaactaggtcaaaaacaaaacaaaacagtgacactcacttgtgtgtatataaactctagagacatcttaggccctcccttcatctttaacctggtggatggagccagttattaatttataataatacatgtctgaaatttgaccaaaaacatcttctttatgtcaaggttaatatattttcttcagacattcctaacttgactagtggttaacatttagcaccttggttgtctttcaatatataggatttgggtgaaaaataaggaacttagtctttgagaagggacagtatgtggttcgtattgatcaaggatcccaaataatgcaatcattctcatctgttgaggatgtgggaacttttctgtcaggaaaatttagtttacagaatacttctgcatacaacattaattaggaaacaaagaactttaatgctgtacctctgcatgaagtttctgtgagctttctttatcttgcttaacttatcctcctttccttccccaccaaaattgggattgttctaaacaatttcaatttaattcattgtcaacaaaacgatagaatgttttgcttggaagaaacctggtccattcccctcattgtgaagaatcccgaatcctgggcctgtccagggtcaaatggagtttttggtattaatacatctctgcagggtttctttttggagcactgtgctgtctttcctagtcagtcagggacttttttaagcttcaaagaacatggtctgatgcaaaggtcttctaccgacttcatggtatttaggaaaaatttttaagtgataataccatgccgagttacctggtcactgtaatactggttctccattaaaatgtagatgctttgtctaattccacttcaagatgatttaattgagcttctataactatcaactatcaaattctagtttcaagtatctcactgtacctatatcatatctgttctcaactttgtttgattctccactcattttcaatcagagttgaagccttctttgcctttcttctttgtcttatttctgccttcatctcccacttctcacccaactctgccactgttcaggagcagttgactaaacttttatccttcctttaacttaatctttttatccttctgtttttagttcttacagtggtaatcacatcagtttggcaatctaagatgtctttatcaagggtcagcccttttctatttggagctgaatcttttctttcatgtagaaatctacatgtatatacaagaaatgtatttttatctgcaggataatattgtttcaaataattttattaagagttaactttttaggtattttcccttttaatgtggttttgaaatgttaattgcatttttacacatgatgcattcagtggacactcttttttcctaattataactcatctctgaatgcattgtgccaatcaagagtaagataggattcagtgcgcaaaatttgcttttgatgcttattaagagtaaacccatgaatttgaatttttatattatgcttggtacttggaattgatatataccttattaaagcttgaaaacatttagcatttgaatagtaagtttcatcacaaatcatgtcttttgcctcttttgttacccaggttcgatcaaggggactggatgcccaagtgattttctctaataatcgggttgggacttaactttaaggtgttttcaatgtgattttagtatttacagtaataaataaaatttatacaaagtttcagagaactaccaactctctagttaattttgatgaagatgttttcattaatagtctggtttagtattaatttaaccttgaaataagaaattggtcctgatttgccaccttcatttttccatctgctgaaatgccatttcagaatgtataaaagtactttcagaattagaagaaaagtgagagcttcagcagaacgtgtcaagtcgctaataacaggagtcgaaccttatgtttgaaaattaactgagtgagttaagtgcaagcataaactaaaatttatatgactttgaatttaagaaccactaataactgtgttctaattaacacagtaatctgttcagccaaaggatactaacagccattctttggactgtggttaatttgataacttcaagaagttataactttgctaccctggattctgatgcaatttcaatataaaaagttgttcctttcatagtttttccccccaaaagaagtgcctattacattttaccttaatgtttatttatcatccaagtgttcttgatataaaatcagtatacagaaaattttaagagaacttacattcaagggacatagagggaaaatgttaatgtgtatttcattgtttcttgtggaatttttttttcattcggtttgagaatggacagtgtgtctaaggatgtgatttaaatttacttaggatggatttagcattgaggttattaagacaaagttagcagaggccagccagcactgtgctgcacaactccaggaactccatggtatgctcacaattttctgcaagttgcctccacttccaagtggccagtgatttgttaaaataccttgcccaagaatataactgattgatgaaagggcatatttaggtcaatataaaataatagcaagtatttactgagagcttactgtgtgctaggcattttcttaatatttcaatgtgtatttaatcctcacaacaacccaatgtggtaggttattgatatcctcttcttaaaaatgagtaaatggaggcccagagaaatgtaatttgcctgagatcaaattaaggttgcttaagatcaaactgctaagaaggggcagtttgagtctgagctagtgctcctaaacactggacatttttgctgtgaaccacagtcgggaaggtttaatgtttagactctttcctcagaggcttttaactacacacaattttgacatgttttccaagctcagaaagctcattaaaaacaactaaaactg

SEQ ID NO: 102 - DNA, 1225 bp, Homo Sapiens
cagaaaagaggtggagagggggggaataagaaagagagagaaggaaaggagagaaggcaggaagaaggcaagggacgagacaaccatgctgtgctgtatgagaagaaccaaacaggttgaaaaaaatgatgacgaccaaaagattgaacaagatggtatcaaaccagaagataaagctcataaggccgcaaccaaaattcaggctagcttccgtggacacataacaaggaaaaagctcaaaggagagaagaaggatgatgtccaagctgctgaggctgaagctaataagaaggatgaagcccctgttgccgatggggtggagaagaagggagaaggcaccactactgccgaagcagccccagccactggctccaagcctgatgagcccggcaaagcaggagaaactccttccgaggagaagaagggggagggtgatgctgccacagagcaggcagccccccaggctcctgcatcctcagaggagaaggccggctcagctgagacagaaagtgccactaaagcttccactgataactcgccgtcctccaaggctgaagatgccccagccaaggaggagcctaaacaagccgatgtgcctgctgctgtcactgctgctgctgccaccacccctgccgcagaggatgctgctgccaaggcaacagcccagcctccaacggagactggggagagcagccaagctgaagagaacatagaagctgtagatgaaaccaaacctaaggaaagtgcccggcaggacgagggtaaagaagaggaacctgaggctgaccaagaacatgcctgaactctaagaaatggctttccacatccccaccctcccctctcctgagcctgtctctccctaccctcttctcagctccactctgaagtcccttcctgtcctgctcacgtctgtgagtctgtcctttcccacccactagccctctttctctctgtgtggcaaacatttaaaaaaaaaaaaaaaaagcaggaaagatcccaagtcaaacagtgtggcttaaacattttttgtttcttggtgttgttatggcaagtttttggtaatgatgattcaatcattttgggaaattcttgcactgtatccaagttatttgatctggtgcgtgtggccctgtgggagtccactttcctctctctctctctctctgttccaagtgtgtgtgcaatgttccgttcatctgaggagtccaaaatatcgagtgaattc

SEQ ID NO: 103 - DNA, 4400 bp, Homo Sapiens
aaaacggacctcagaaaaccaggactagctctactgtcgggggcagggtgaccccatcagtaacctacaacccctctagaacttcacaactccctctcaccatggagtttgcatttgatgcagaaaggcatgtgatccctccctccttctgacctcttagctggggattccatggccacacaaccctgtgactccatgtccccccgattccaggaccccccatggccccatgattccttgactcctatgaccttatgacccctgaccttccaagtgacttccttggactttgacccctgtgactgtgcttcccattccccgcccccacaacctgtgactctggctccctttgggggtcttgttagtctgggcctccccaggaagatgtgggggaggctctggcccctcctcctcagcatcctcacagcaactgcagtcccaggaccctcactgcggagaccgtctagagaactagatgccacccctcggatgaccataccctatgaagagctctctgggacccggcacttcaagggccaagcccagaactactcaacactgctgctggaggaggcctcagcaaggctgctggtgggagcccgaggtgccctgttctctctcagtgccaacgacataggagatggggctcacaaagagatccactgggaagcctccccagagatgcaaagcaaatgtcatcaaaaagggaaaaacaaccagacggagtgctttaaccatgtgcggttcctgcagcggctcaattctacccacctctatgcatgtgggactcacgccttccagcccctctgtgcagccattgatgctgaggccttcaccttgccaaccagcttcgaggaggggaaggagaagtgtccttatgacccagcccgtggcttcacaggcctcatcattgatggaggcctctacacagccactaggtatgaattccggagcattcctgacatccgccggagccgccacccacactccctgagaactgaggagacaccaatgcattggctcaatgatgcggagtttgtgttctccgtcctcgtgcgggagagcaaggccagtgcagtgggtgatgatgacaaggtgtactacttcttcacggagcgtgccactgaggagggctctggcagcttcactcagagccgcagcagtcaccgtgtggcccgtgtggctcgtgtctgcaagggagacctgggagggaagaagatcctgcagaagaagtggacttccttcctgaaagcccgtctcatctgccacattccactgtatgagacactgcgtggggtctgcagcctggatgctgaaacctcaagccgtacacacttctatgcagccttcacgctgagcacacagtggaagaccctggaggcctcagccatctgccgctatgacctggcagagatccaggctgtctttgcaggaccctatatggaataccaggatggttcccggcgctggggtcgctatgagggtggggtgcctgagccccggcctggctcgtgtatcacagattcattgcgcagccaaggctacaattcatcccaagacttgccatccctggtcctggactttgtaaagttgcacccactgatggctcggcccgttgtgcccacacgtggacggcccctgctgctcaagcgcaacatacgctacacacaccttacagggacacctgtcaccacgcctgctggacctacctatgacctgctctttctgggcacagctgatggctggatccacaaggccgtagtcctgggctctgggatgcacattattgaagagacacaagtgttcagggagtcccagtctgtggaaaatctagtcatctctctattgcagcacagcctctatgtgggggctcctagcggagtcatccagctaccactctccagctgctcccgctaccgatcctgctatgactgcatcttggcccgagacccctactgtggctgggaccctggcacccatgcctgcgcagcagccaccaccatagccaacaggtcccagggaagcaggacagcactgatacaggacatagagagaggaaatcgaggctgtgagagcagcagggatacagggccaccaccaccactgaagacccgctctgtgctccggggtgatgatgtcctcctgccctgtgaccagccatccaacctggcccgggccttgtggctactcaatgggagcatgggcctgagcgatgggcagggtggctaccgtgtgggcgtggacgggctgctggttacagatgcacagcctgagcacagtggcaactatggctgctatgccgaggaaaatggcctccgcaccctgctggcctcctatagtctcacagtccggccagccactcctgccccagctccaaaagcccctgccacacctggggcacagctggcacctgatgtgagactgctctatgtgctagccattgccgcgcttggtggcctctgcctcatcctggcctcctccctcctctatgtggcctgtctgcgggaaggcagacgagggcgccgacggaaatactcactgggtcgggccagccgggcaggaggatctgcggtgcaactgcagacagtctcaggccagtgtcctggagaggaagatgagggtgatgatgagggggctgggggcctggagggcagctgtctccagatcatccctggggagggagccccagccccaccacccccaccgcccccaccgccaccggctgagctgaccaatggcttggtggcactgcccagccggctgcggaggatgaatggcaatagctatgtgcttctgaggcagagcaacaatggagtaccagcagggccctgctccttcgccgaggaactcagccgcatcctggaaaaaaggaagcacacgcagctcgtggagcagctagatgagagctctgtctgagcccagcctcccagaacaaatgctcttccaagccagcctatctgtcccaggctgggccactgcctccctaacacagccaccctcccttcattacccccactccatacccttctcccaactttttgatgtccctgtagggctggccagtcaggcccagccaaagccccctcctcagtctccacagacccacatgtgagcagcccaggcccatcggtgctcctcagaggtaggtgctccctcaggatcaggtgccctgcagacccagagccagttcctatcccctaacctaaacacttataggtgaggactccatcctcctgttccattcatctgcccaaaccctttctctttctcccaggcagggctctgcaggtccatatgggctcaatgtcaccaccctctgcatggccctgtgtgctggatggtcctgaaaccagacaagacctctgccagccacctaagccctgcgtacattcacatgcacacatggaagaatgtttatcggctgggctgcagtgcccccaccctcaccttctcctggtgcattcttgtttcatccctgcttctggacttggggtaccctcccaattgccacatcctatctggtcctcttccccagccccatgtggtgacctctttgtcaagagcttgggaacgggccagcctggggaggtaagactgcatcactcccctcctctcccttcctgtgtggcccttgtgaatcagcctccccactctccttggtcattctcaagagtatgagagacagagctccaggcatgtcccatccccatgcacatgtggtaacacacacctgtatcacacatgtgcttacatttccactcacatgcacctctgagcctcccttgctgtcttggacctgtctgttgggtttagtccgtggacatttcagagggagatccccctcccatttaactgtcctcacaggcccttgcctaggatggatgaccaacactgcactcaatgagccagcctctcttttgggggaatcaagcatttgcttcctctagactacagcagggaaagggaggagaaatctgatgtctcaactggcacatgaagcccattcttggaactatgcaaagggcagaggctgggagtttggacgcttagctcctacccctgtcctacctcaccggggcactttcaggggccaggggcctctgaagtctctaggcctatatgggacaatcaattctgactgagctcccccattcccctcgggtgaggatgactgttatttttgtagctgagaacgtggaatcccacgggtttttactgcccttcacccaacctctcccacctccaccccacaatgaatgtatttattgtgagaatggctacacttctttaggaatgcccccacttacaaccaggtgggtggaacaggcatgtgacagagtggggagcctgggctcagctcctccccctgccgttggttaataaacaccctttttccccac

SEQ ID NO: 104 - DNA, 1327 bp, Homo Sapiens
ctcctctccgcgcggggcgggctccgcgccacgtgactccgcggccgggccgggacgcgacgggacgcgctgggaccggcgtcgggggtcgcggggaccatgcagcggaggtgggtcttcgtgctgctcgacgtgctgtgcttactggtcgcctccctgcccttcgctatcctgacgctggtgaacgccccgtacaagcgaggattttactgcggggatgactccatccggtacccctaccgtccagataccatcacccacgggctcatggctggggtcaccatcacggccaccgtcatccttgtctcggccggggaagcctacctggtgtacacagaccggctctattctcgctcggacttcaacaactacgtggctgctgtatacaaggtgctggggaccttcctgtttggggctgccgtgagccagtctctgacagacctggccaagtacatgattgggcgtctgaggcccaacttcctagccgtctgcgaccccgactggagccgggtcaactgctcggtctatgtgcagctggagaaggtgtgcaggggaaaccctgctgatgtcaccgaggccaggttgtctttctactcgggacactcttcctttgggatgtactgcatggtgttcttggcgctgtatgtgcaggcacgactctgttggaagtgggcacggctgctgcgacccacagtccagttcttcctggtggcctttgccctctacgtgggctacacccgcgtgtctgattacaaacaccactggagcgatgtccttgttggcctcctgcagggggcactggtggctgccctcactgtctgctacatctcagacttcttcaaagcccgacccccacagcactgtctgaaggaggaggagctggaacggaagcccagcctgtcactgacgttgaccctgggcgaggctgaccacaaccactatggatacccgcactcctcctcctgaggccggaccccgcccaggcagggagctgctgtgagtccagctgaggcccacccaggtggtccctccagccctggttaggcactgagggctctggacgggctccaggaaccctgggctgatgggagcagtgagcgggctccgctgccccctgccctgcactggaccaggagtctggagatgcctgggtagccctcagcatttggaggggaacctgttcccgtcggtccccaaatatccccttctttttatggggttaaggaagggaccgagagatcagatagttgctgttttgtaaaatgtaatgtatatgtggtttttagtaaaatagggcacctgtttcacaaaaaaaaaaaaaaaaaaa

SEQ ID NO: 105 - DNA, 5272 bp, Homo Sapiens
ttgtatccatgtttttccgggcgtcccccggagggacaggttgcgggtgaccttttcaagtgtggaggaaagggaagctgcttttgtcttcaggaatgatgcaggtctcgactcaagcctgacgggcccaaacctccctggagctggctgacgactctgcccgagttcctgaagaggggtcccgggggtcccggagcggaagtgggagcgcgtgggcgtgggcctcctcggctgcctggggctccagacttgtgctgcgtgcggctccggagctctgttctcgctcctgagcagctgctaggtttcccaagcgactgtctcaaccgcccggccgcctcccccgggcagccagagcttcacatctacctccagccgggacccgcccccgagccgcggggcccacgcccagagccctccgccgtccccagcgcagtgcagcagagcgcgatccagtctggggccgggccgcgcttccgcgcacgcgcggagaaacccgcgccctccgaggggggaggggacagagggggcgtcacgggggcaggagaagaaggaggaggaggcccgcgtcgcctccggcggggctcgcgctcgccccgcgctcgccctccgcctcgcccgagccccgggagggtgaaacgctttctcccagcatgcagcgggaggagggatttaacaccaagatggcggacggcccggatgagtacgataccgaagcgggctgcgtgccccttctccatccagaggaaatcaaaccccaaagccattttaaccatggatatggtgaacctcttggacggaaaactcatattgatgattacagcacatgggacatagtcaaggctacacaatatggaatatatgaacgctgtcgagaattggtggaagcaggttatgatgtacggcaaccggacaaagaaaatgttaccctcctccattgggctgccatcaataacagaatagatttagtcaaatactatatttcgaaaggtgctattgtggatcaacttggaggggacctgaattcaactccattgcactgggccacaagacaaggccatctatccatggttgtgcaactaatgaaatatggtgcagatccttcattaattgatggagaaggatgtagctgtattcatctggctgctcagttcggacatacctcaattgttgttgcttatctcatagcaaaaggacaggatgtagatatgatggatcagaatggaatgacgcctttaatgtgggcagcatatagaacacatagtgtggatccaactagattgcttttaacattcaatgtttcagttaaccttggtgacaagtatcacaaaaacactgctctgcattgggcagtgctagcagggaataccacagtcattagccttcttctggaagctggagctaatgttgatgcccagaatatcaagggcgaatcagcgcttgatttggcaaaacagagaaaaaatgtgtggatgatcaaccacttacaagaggcaaggcaagcaaaaggatatgacaatccgtccttccttagaaagctgaaagctgataaggaatttcggcagaaagtaatgttaggaactcctttcctagttatttggctggttgggtttatagcagacctaaatattgattcttggctcattaaagggctaatgtatggtggtgtttgggctacagtacagtttctttcaaaatcctttttcgatcattcaatgcatagtgcattgccccttgggatatatttggcaaccaaattctggatgtatgtgacgtggttcttctggttttggaatgatctcaactttttatttatccatcttccattccttgccaatagtgttgcacttttctacaattttggaaaatcttggaaatcagatccagggattattaaagcaacagaagagcaaaagaaaaagacaatagttgaacttgcagagacaggaagtctggacctcagtatattctgcagtacctgtttgatacgaaaaccggtgaggtccaaacattgtggtgtgtgcaaccgctgtatagcaaaatttgatcatcattgcccatgggtgggtaactgtgtaggtgcaggcaaccatagatattttatgggctacctattcttcttgctttttatgatctgctggatgatttatggttgtatatcttactggggactccactgtgagaccacttacaccaaggatggattttggacatacattactcagattgccacgtgttcaccttggatgttttggatgttcctgaacagtgttttccacttcatgtgggtggctgtattactcatgtgtcagatgtaccagatatcatgtttaggtattactacaaatgaaagaatgaatgccaggagatacaagcactttaaagtcacaacaacgtctattgaaagcccattcaaccatggatgtgtaagaaatattatagacttctttgaatttcgatgctgtggcctctttcgtcctgttatcgtggactggaccaggcagtatacaatagaatatgaccaaatatcaggatctgggtaccagctggtgtagcaacatcttatcctatgaagcatattgctgagtggtgcctgaaaattgtgtctgtccgtgtctttctcacactcgaatccacatcctttgaacaagagcatgctatgtgtagggctaatggtgaattttacagtcttcttttcaacacttttattaacaaaagtaaacatggacagaacacactgccatttctgggaagagtaaagatgataaaaaataattttaatggttcttaatgtggaaattcacaacatactcaacttttgggttttgttctcacagtatttttcacaaaaaaagggtaaacttattctattgacagacatggtgtactgatcagaaatgttcagttttaactaaaactaaatttatgttatttggctaaatgttatgatgcagtctagtacgagtattgcatctaattccaggagcatcgttttaagttgattgactagttattatgtacatttcagaatgtacacataaatactgtgatgaaaatcatgtgattgggatctactgtgatgttgtcttcaaaggcaggagaaaataatgttcacaataaaatgtgctaacaatgttttgtttctatcagctgttgcaatgctgatatatttctagttcagtgaaataatttgtagtaaccttactctgaggttttacggtctgataatgaagcacttgcatgagtatagtaagtcatgtttttttgttcaaatttaaaagccctgctaattgcatgacacaccacatagaatgtatactagcagatactatccagtgaagcataaattagaatttaatttgatgttcaaaaacagttccatttttaagggttaaggtggtattttcaagaaaaggcagaacaaataatgcaaaattctcagtaatagtgatacatggatatacttccttttaaattctcagctgcaaaataattgtagacaaaataatggcatttaactaaagatggagcatgatctgtgtacatagcacatgtgaataaaagaaaagctgacagtatattctggtttcaataaaatgacctatcagaaagtagaatttcatccccaagagtatttcagtttatccaatattgagtaagttctgaaacagttttagaaaaaattttctttttgttaaatgtgatgcactgatcaatttttgtcacagcattttcataccttcatggtggactactagtcactgcttccataaatattgtttacagggtgagatttggtttattcatcttaagtgctgtagcaaactgtggttcgagcaacctgtgggaaatctgtgagagggaatggggtgggagatgtgggggaatggtggtcagactgatgacagatcctagaccaatgtaaagaatgtgtatctgtatataaataatttatcaaatagttttctctttgtgtctgtgttagtgtttttaaagctgctcatttcattttgtccaaccaaaaagaaaagggagataactaatgagcttctagtgatgttcaaaattgctgttaataggcattataccctgcaagttcactgcatgtctgatgcttggtaaaactagtcttccctgtaaaatgcagattacaggtattaaagcaatctagtggtatacccgccccttgccttagtaagaggagcagtgaaatgtatatagttgatgttcagtatttccaagtaccatttttatatagtagcttatttgaccataagtcacacatcaaaaaaagattacccttagtgtatgtgttttaatattagaaaattggcatatgtactttatttttgaaaagggaagagatgggtgtggggtggcaatagcattgtgccattttgtcatagaatgtaaaaattggttaactttacaaatgtcagctagttttgactactaattgggggaaattttagataatttttaaattcaaagttatttataaaatgctagaatttgttttaattttttgtattttgagccacttcacatgaagactcagttgcatttttatcgaatacatttttatcaaccagttaaagactatggtggttttttcagagtttggctaagaatgttgttaccatcttctttgtttgtggtacaatattttcagtgcaaaagagatgtcattcagttaaaaagacaaacctctagatgtgtaattacatggaaaatactagcaatgtgaatgcttttgtagtaaccatcttgtagtacctgtgaaatctataactcagaaatggtcagatggtcaggagccagctatgcagcagtataccatctgtttaattattttgtaggtcctgtgtgtggaaccaactataaacccagttctaaagttgtgtatgatggtgaacctttgggaatagttcttatcaacttaattggatacttttagcaaataggaacttaattctcagcactgaacatgaattacttccttggagtttttttcattcatatttttgttgtttccaggaatttatttgatattaatgggcgtaaaacagcatcattgtacttaagctatggatgtttttattttatattttctttatttataactgtgccaagtattattttgctacttaccgtgttattctgtggaaagaaaaacctgtaaagtgtttaataaattagccctccttacataaattaaatgtcaaaattttgtaaaatattaatcagaataaatactgactcttaaaaaaaaaaa

SEQ ID NO: 106 - DNA, 876 bp, Homo Sapiens
taccattcttcaagaaacggtttgaatcagactgcctttccttttgtcttcattgtcataaacatctgcccccgtgtggttctgactggccgcgaacccctacccgaagcttttattccatcattgtgcaccgttggtggggaatgctgtggcaacaggccacgcctccacttactggttggctttgcgcaggcgccaacggaagtgggtcgcaggaagaggaagtcccgcctctctctcctcaggcagcagcaacgcggaggaaacgggagtgaacggagagcgtagtgaccatcatgttttagcacaaccccctcagaccactctgtggagaacagactgtcagggaacgtgggtggaggcagagagaccagaaagattccaggacagagatgacagaggcttaggccatgagcctcctcaacaagcccaagagtgagatgaccccagaggagctgcagaagcgagaggaggaggaatttaacaccggtccactctctgtgctcacacagtcagtcaagaacaatacccaagtgctcatcaactgccgcaacaataagaaactcctgggccgcgtgaaggccttcgataggcactgcaacatggtgctggagaacgtgaaggagatgtggactgaggtacccaagagtggcaagggcaagaagaagtccaagccagtcaacaaagaccgctacatctccaagatgttcctgcgcggggactcagtcatcgtggtcctgcggaacccgctcatcgccggcaagtaggggccgcctgtctgttgacagaactcactcctctgtcctatgaagaccgctgccattggtgttgagaataataaagctctgtgtttttttctaaaaaaaaaaaaaaaaa

SEQ ID NO: 107 - DNA, 4063 bp, Homo Sapiens
gcacccaggtcgggcggtgggggcgagcggaggggctgaggggcggagaggcctggcgggccgctgctgcgggccaggggacgggggcggagccggagccggagccgacgggcggtggccgcactgggaccccggaatcccgcgcgctgcccacgattcgcttctgaggaacctagaaagattgtacaatgaatggtgattctcgtgctgcggtggtgacctcaccacccccgaccacagcccctcacaaggagaggtacttcgaccgagtagatgagaacaacccagagtacttgagggagaggaacatggcaccagaccttcgccaggacttcaacatgatggagcaaaagaagagggtgtccatgattctgcaaagccctgctttctgtgaagaattggaatcaatgatacaggagcaatttaagaaggggaagaaccccacaggcctattggcattacagcagattgcagattttatgaccacgaatgtaccaaatgtctacccagcagctccgcaaggagggatggctgccttaaacatgagtcttggtatggtgactcctgtgaacgatcttagaggatctgattctattgcgtatgacaaaggagagaagttattacggtgtaaattggcagcgttttatagactagcagatctctttgggtggtctcagcttatctacaatcatatcacaaccagagtgaactccgagcaggaacacttcctcattgtcccttttgggcttctttacagtgaagtgactgcatccagtttggttaagatcaatctacaaggagatatagtagatcgtggaagcactaatctgggagtgaatcaggccggcttcaccttacactctgcaatttatgctgcacgcccggacgtgaagtgcgtcgtgcacattcacaccccagcaggggctgcggtctctgcaatgaaatgtggcctcttgccaatctccccggaggcgctttcccttggagaagtggcttatcatgactaccatggcattctggttgatgaagaggaaaaagttttgattcagaaaaatctggggcctaaaagcaaggttcttattctccggaaccatgggctcgtgtcagttggagagagcgttgaggaggccttctattacatccataaccttgtggttgcctgtgagatccaggttcgaactctggccagtgcaggaggaccagacaacttagtcctgctgaatcctgagaagtacaaagccaagtcccgttccccagggtctccggtaggggaaggcactggatcgcctcccaagtggcagattggtgagcaggaatttgaagccctcatgcggatgctcgataatctgggctacagaactggctacccttatcgataccctgctctgagagagaagtctaaaaaatacagcgatgtggaggttcctgctagtgtcacaggttactcctttgctagtgacggtgattcgggcacttgctccccactcagacacagttttcagaagcagcagcgggagaagacaagatggctgaactctggccggggcgacgaagcttccgaggaagggcagaatggaagcagtcccaagtcgaagactaaggtgtggacgaacattacacacgatcacgtgaaacccttgctgcagtctctctcgtccggtgtctgcgtgccaagctgtattaccaactgcttgtggactaaagaggatggacatagaacttccacctctgctgtccctaacctgtttgttccattgaacactaacccaaaagaggtccaggagatgaggaacaagatccgagagcagaatttacaggacattaagacggctggccctcagtcccaggttttgtgtggtgtagtgatggacaggagcctcgtccagggagagctggtgacggcctccaaggccatcattgaaaaggagtaccagccccacgtcattgtgagcaccacgggccccaaccccttcaccacactcacagaccgtgagctggaggagtaccgcagggaggtggagaggaagcagaagggctctgaagagaatctggacgaggctagagaacagaaagaaaagagtcctccagaccagcctgcggtcccccacccgcctcccagcactcccatcaagctggaggaagaccttgtgccggagccgactactggagatgacagtgatgctgccacctttaagccaactctccccgatctgtcccctgatgaaccttcagaagcactcggcttcccaatgttagagaaggaggaggaagcccatagacccccaagccccactgaggcccctactgaggccagccccgagccagccccagacccagccccggtggctgaagaggctgccccctcagctgtcgaggagggggccgccgcggaccctggcagcgatgggtctccaggcaagtccccgtccaaaaagaagaagaagttccgtaccccgtcctttctgaagaagagcaagaagaagagtgactcctgaaagccctgcgctaacactgtcctgtccggagcgaccctggctctgccagcgtccccggccacgtctgtgctctgtccttgtgtaatggaatgcaaaaaagccaagccctccgcctagaggtcccctcacgtgaccagccccgtgtagccccgggctgacccagtgtgtgctcagcagccccaccccaccctgccccttgtcctctcagagcctcagcttctgggggagacatgctctccccacaggggggaggcactaagtcatggtcctggctggaaggtactgaaggcttctgcagctttggctgcacgtcaccctcctgagcctcacctttcctgccgtccctcctgttgtgaaatcaccacattctgtctctgcttggcttcccctccaccctaaagtctcaggtgacggactcagactcctggcttcatgtggcattctctctgctcagtgatctcacttaaatctatatacaaagccttggtcccgtgaaaacactcgtgtgcccaccagcggccttgaagaggcaggtctgggccagatgctgggcaggaaaccccagcggcagatgggcctgtgtgcacccaacgtgatgctatgcatgtctgaccgacgatccctcgaccagaatcagattcaggagctcagtttctttttcacttgggtctctggattcctgtcatagggaaggtatatcaggaggggaagaggcctttctagaattttctttgagcaggtttacaatttagcttacatttttcgactgtgaacgtgaataggctgctttttgctttcttctttccagaccccacagtagagcacttttcacttatttgggggaggcttcaggggactgttctcaccttaactcagccagaaagatgccctagttgtgatcaaaggtaactcgaggtggagggtagccctggggcccctcgacatcaccgtcattgatggagcctgaaccgtgtgctcctcggcagatgctgttgttgttacttccctccaagaggctggaaaagggctcagagctgctgagcaggaaccggagggtgacccatttcaggaggtgccggtaccagcctgactaggtacaggcaagcttgtgtgggcccaacaggcccttggtagagctggtgccagatgtgggctcagatcctgggcatgatgggccgagccacctcggatcccactgattggccagccgagcgagaaccaggctgctgcatggcactgaccgccgcttccagcttcctctgagccgcagggcctgctacgcgggcaagcgtgctgcctctcttctgtgtcgttttgttgccaaggcagaatgaaaagtccttaaccgtggactcttcctttatcccctcctttaccccacatatgcaatgacttttaattttcacttttgtagtttaatcctttgtattacaacatgaaatatagttgcatatatggacaccgacttgggaggacaggtcctgaatgtcctttctccagtgtaacatgttttactcacaaataaaattctttcagcaaaaaaaaaaaaaaaaaaaaaaaaaaaaaaa

SEQ ID NO: 108 - DNA, 4475 bp, Homo Sapiens
gggtagaatggccgctgccgccgtcacccgcgggaccccgggagcacagactccccctccccccggcccctcaggccgggggtgaccttgccccctggagccctcaccatgaataccaaggacaccaccgaggttgctgaaaacagccaccacctgaagatctttctccccaagaagctgctggagtgtcttcctcgctgcccgctgctgcctccagagaggctacggtggaatacaaatgaggagattgcatcctacctgatcacctttgagaagcatgatgagtggctgtcttgtgccccaaagacaaggcctcagaatggctccatcatcctctacaatcgcaagaaggtgaaatatcggaaggatggttacctctggaagaagcggaaggatgggaagaccacccgagaggaccacatgaagctgaaggtccagggcatggagtgtctctatggctgctacgttcactcttccatcgtccccacattccatcggcgctgctactggctgctccagaaccctgacatcgtccttgtgcactacctgaacgtcccagccctggaggactgtggaaagggctgcagccccatcttttgttccatcagcagcgaccgtcgagagtggctgaagtggtcccgggaggagttgttgggacagctgaagcccatgtttcatggcatcaagtggagctgcgggaatggaacagaagagttctctgtagaacacctggtgcagcagattttggacacccacccaaccaagcctgctccccgaacccacgcctgtctctgcagtggggggcttggttctgggagccttacccacaaatgcagcagcacgaaacaccgcatcatctctcccaaagtggagccccgagctttaaccctgacctctatcccccacgctcaccccccagagcctcctccactgatagccccacttcccccagagctccccaaggcacacacctccccatcttcttcctcttcttcctcctcatcaggttttgcagagcccctagaaatcagacctagccctcccacttctcgagggggttcttcaagaggaggcactgctatcctcctcctgacaggactggagcagcgggctggaggcttgacgcccaccaggcacttggctccacaggctgatcctaggccttccatgagtttggcagtggttgtaggcactgagccttctgccccaccagctcctcccagtcctgcctttgaccctgatcgttttctcaacagcccccagaggggccagacatatggaggggggcagggagtaagcccagacttccccgaggcagaggccgctcataccccctgttctgccctagagcctgctgctgccctggagccccaggcagctgctcggggtcccccaccacagtcagtagcaggtgggagaagaggaaactgcttcttcatccaagatgatgacagtggggaggagctcaagggtcacggggctgccccacccataccttcaccccctccctcacccccaccctcacctgcccccttggagccgtcaagcagggtaggaagaggagaggccttgtttggaggacctgttggggccagtgaactggagcccttcagtctttcatcattcccagaccttatgggagaactcatcagtgacgaagctccaagcatccctgctccgaccccccagctgtctcctgctcttagcaccatcacagacttctccccagagtggtcctacccagagggtggggtcaaggtgctcatcacaggtccttggaccgaagccgccgagcattactcctgtgtctttgatcacatcgcagtgccagcctcacttgtccagcctggtgtcttacgctgctactgtcccgcccatgaggtagggctggtgtctttgcaggtggcagggcgggaggggcccctttctgcttctgtgctctttgagtatcgagcccgccgattcctgtctctgcctagtactcaacttgactggctgtcactggacgacaaccagttccggatgtccatactagagcgactggagcagatggagaagcggatggcagagatcgcagcagctgggcaggtgccttgccagggtcctgatgctcctccagttcaggatgaaggccaggggcctgggttcgaagcacgggtagtggtcttggtagaaagcatgatcccacgctccacctggaagggtcctgaacgtctggcccatggaagccccttccggggcatgagccttctgcacctggctgctgcccagggctatgcccgcctcatcgagaccctgagccagtggcggagtgtggagactggaagcttggacttagagcaggaggttgacccgctcaacgtggatcatttctcttgcacccctctgatgtgggcttgtgccctgggacacctggaagctgctgtgctccttttccgttggaaccgacaggcactgagcattcccgactctctgggccgtctgccattgtctgtggctcattcccggggtcatgtgcgccttgcccgctgccttgaggaactacagagacaggagccttcggtggagcccccatttgccctatcgccaccctcctccagcccagacactggtctgagcagcgtctcctcgccctcggagctgtcggatggcaccttttccgtcacgtcagcctattctagtgccccagatggcagtcccccccctgcacctctgccagcctctgagatgactatggaggacatggccccaggccagctttcctctggtgtcccagaagcccccctactcctcatggactatgaggctaccaactccaaggggcccctctcctcccttcctgccctcccaccagcttcagatgatggggctgctccagaggacgctgacagcccacaggctgtggatgtgatcccggtggacatgatctcactagccaagcagatcatcgaagccacaccggagcggattaaacgagaggacttcgtggggctgcccgaggctggagcctcaatgcgggagcggacaggggctgtggggctcagtgagaccatgtcctggctggccagctacctggagaatgtggaccatttccccagctcaacccctcccagcgaactgccctttgagcgaggtcgcctggctgtcccttcagcaccctcctgggcagagtttctctctgcatccaccagtggcaagatggaaagtgattttgccctgctgacactatcagatcacgagcagcgggaactgtatgaggctgcccgagtcatccagacggccttccgaaagtacaagggccggcggctgaaggagcagcaggaggtagcagcagctgtaatccagcgctgttaccggaagtacaagcagctgacctggattgcacttaagtttgcactctataagaagatgacccaggcggccatcctgatccagagcaagttccgaagctactatgaacagaagcgatttcagcagagccgccgagcggctgtgctcatccagcagcactaccgctcctaccgccgcaggcccggccctccccaccggacttcggccaccctgcctgcccgcaacaaaggctcctttctcaccaagaagcaggaccaggcagcccggaagatcatgagattcctgcggcgctgccgacacaggatgagggaactgaagcagaaccaggagctggaagggcttccccagccgggactggccacatgacctggccaccgcctttctcaccaccctgggggcgcctcgtgcagtcttaacagggagagggctttctggggcagggggagcccctgtcggcagctttcctgttcacctttgttggagccctctgtaggcctcctccctcctccccacgccttgctcccacacccctctcctcgtccctcctggtcgtgccccgtctcttttggtcctggctccagaaaacccgcgccccacatacctgcatcttccgctgtgacctccggagccctgcctgcccctgctccccagctcctcctgcctgcacccgactcggccccctcctgacttgccttatttatttgttcgacgcgtctctgaatgtatccgcctcggttcccaccactgccttcgctgcgcacgcccctcgtgtttcagggctgaccgtgtccccacccgactccgcatgtttgcgtctgtttcctccctctctggccctgtcttaccccatcacccgactctggccactgacctcagggccgaaggggaggtggtgtacataggaacgcgttgcggagtccgccccgtcccccgaggggaggggtcttgtacatactgtaacatacagagtatagtgaagaatctatttaaggcgccgcggggagggctgcacggccgggcttgtggttctctagcgcggcgggggcctcctgccggctccacgggcactttctacttgtgcatgggcttggtttatacgaattgccattaaacatcgctgcacc

SEQ ID NO: 109 - DNA, 3593 bp, Homo Sapiens
ggctcctcagcttccagccaaaatggcggagaacagcgagagtctgggcaccgtccccgagcacgagcggatcttgcaggagatcgagagcaccgacaccgcctgtgtggggcccaccctccggtctgtgtatgatgaccaaccaaatgcgcacaagaagtttatggaaaagttagatgcttgtatccgtaatcatgacaaggaaattgaaaagatgtgtaattttcatcatcagggttttgtagatgctattacagaactccttaaagtaaggactgatgcagaaaaactgaaggtgcaagttactgataccaaccgaaggtttcaagatgctggaaaagaggtgatagtccacacagaagatatcattcgatgtagaattcagcagagaaatattacaactgtagtagaaaaattgcagttatgccttcctgtgctagaaatgtacagtaagctgaaagaacagatgagtgccaaaaggtactattctgccctaaaaactatggaacaattagagaatgtgtactttccctgggttagtcaataccggttttgtcagctcatgatagaaaatcttcccaaactccgtgaggatattaaagaaatctccatgtctgatctcaaagactttttggaaagtattcgaaaacattctgacaaaataggtgaaacagcaatgaaacaggcacagcatcagaaaaccttcagtgtttctctgcagaaacaaaataaaatgaaatttgggaaaaatatgtatataaatcgtgatagaattccagaggaaaggaatgaaactgtattgaaacattcacttgaagaagaggatgagaatgaagaagagatcttaactgttcaggatcttgttgatttttcccctgtttatcgatgtttgcacatttattctgttttgggtgacgaggaaacatttgaaaactattatcgaaaacaaagaaagaaacaagcaagactggtattgcaaccccagtcgaatatgcatgaaacagttgatggctatagaagatatttcactcaaattgtagggttctttgtggtagaagatcacattttacatgtgacccaaggattagtaaccagggcatacactgatgaactttggaacatggccctctcaaagataattgctgtccttagagctcattcatcctattgcactgatcctgatcttgttctggagctgaagaatcttactgtaatatttgcagatactttacagggttatggttttccagtgaaccgactttttgaccttttatttgaaataagagaccaatacaatgaaacactgcttaagaaatgggctggagttttcagggacatttttgaagaagataattacagccccatccctgttgtcaatgaagaagaatataaaattgtcatcagcaaatttccctttcaagatccagaccttgaaaagcagtctttcccaaagaaattccccatgtctcagtcagtgcctcatatttacattcaagttaaagaatttatttatgccagccttaaattttcagagtcactacaccggagctcaacagaaatagacgatatgcttagaaaatcaacaaatctgctgctgaccagaactttgagtagctgtttactgaaccttattagaaaacctcatataggtttgacagagctggtacaaatcatcataaacacaacacacctggagcaagcttgtaaatatcttgaggactttataactaacattacaaatatttcccaagaaactgttcatactacaagactttatggactttctactttcaaggatgctcgacatgcagcagaaggagaaatatataccaaactgaatcaaaaaattgatgaatttgttcagcttgctgattatgactggacaatgtctgagccagatggaagagctagtggttatttaatggaccttataaattttttgagaagcatctttcaagtgtttactcatttgcctgggaaagttgctcagacagcttgcatgtcagcctgccagcatctgtcaacatccttaatgcagatgctactggacagtgagttaaaacaaataagcatgggagctgttcagcagtttaacttagatgtcatacagtgtgaattgtttgccagctctgagcctgtgccaggattccagggggataccctgcagctagcattcattgacctcagacaactccttgacctgtttatggtttgggattggtctacttacctagctgattatgggcagccagcttctaagtaccttcgggtgaatccaaacacagcccttactcttttggagaagatgaaggatactagcaaaaagaacaatatatttgctcagttcaggaagaatgatcgagacaaacagaagttgatagagacagtcgtgaaacagctgagaagtttggtgaatggtatgtcccagcacatgtagacctcacatggcttgcactcagtgacaccaaatccatgattcaatgttgatcttgagcaagtattggtcatgatacagtaatttgtttacagaatccaaaaatacaatagagaagatacatgagggcttaaacaagaaatagtaataaatatcatttgtatggatttttaaataatcgaatactattttatatatggaaaaaaatgaccattttttcacttttaggggaaaatgcaaaagtgtaatacataaattgtcacaaattatacatgaaattgattacaaatacatttgaaaaacatatgcctctactcataagtatttttttctatttagacttgaatgataatctgttttttgatcagtatatggctttggaattcaatcatgtctgatatggtagtatttcactaccattttctgacttttagcttttattttcacctcaatgtgatttaagcagaccaaaatttctaattctgctaattctgaaggggaaatagacaaatcttaaaagctgcctgaaatcaaacttgatttaactcagtaagaatgtgaattatttgttctacttgggtggtttaatttaatcgttctgaatatgaacaaaaggttttggattttctaaagatgcagtgttgtttctgttcatcagggttaatatttctaactatattgcttgtaggtgaccccattctggatttgtttggtttggtttggttccagttaaaagagaggacaggaactaaatggggctaaccacttcaggtgcagcttgtgcgagggtagatggttcctgcacacagaagttaccacaggggtcaggttactttcttcaaatagcagatttcagtactttatcctcattgtggaaacaagccaaaccaaatgaactctggaaaacctaaaacaaatgtacattttcctttgtgtatgtttccgtggtccaaatggcaatataaatccagtctttattctccctttgttgtatttatgctgaatcttccctttgccttttcaggatttaggcctgtaagaaactatgcctgattctgtaaaataagtgtaaagaattatatgtacatctctggattttgtgatgaaatattaaaaatattgagcaagttgttgaaaatgcaaaaaaaaaaaaaaaaaa

SEQ ID NO: 110 - DNA, 2509 bp, Homo Sapiens
ctgaagcctggggtcagcaggcgctgcgggcgcagctccggtgcaagcgaggacacgacacatgcagtggcttctggactgcgcgatgactggacgcaagtaacttctaggtctgcagacaagaggaagagaagatgaaggaagactgtctgccgagttctcacgtgcccatcagtgacagcaagtccattcagaagtcggagctcttaggcctgctgaaaacctacaactgctaccatgagggcaagagcttccagctgagacaccgtgaggaagaagggactctgatcatcgaggggctcctcaacattgcctgggggctgaggcggcccatccggctgcagatgcaggatgaccgggagcaggtgcacctcccctccacctcatggatgcccagacggcctagctgccctctaaaggagccatcgccccagaacgggaacatcacagcccaggggccaagcattcagccagtgcacaaggctgagagttccacagacagctcggggcccctggaggaggcagaggaggccccccagctgatgcggaccaagagcgacgccagttgcatgagccagaggaggcccaagtgccgcgcccccggtgaggcccagcgcatccggcgacaccggttctctatcaacggccacttctacaatcataagacctccgtgtttactccagcctatggatccgtgaccaatgtgagggtcaacagcaccatgacaaccctgcaggtgctcaccctgctgctgaacaaatttagggtggaagatggccccagtgagttcgcactctacatcgttcacgagtctggggagcggacaaaattaaaagactgcgagtacccgctgatttccagaatcctgcatgggccatgtgagaagatcgccaggatcttcctgatggaagctgacttgggcgtggaagtcccccatgaagtcgctcagtacattaagtttgaaatgccggtgctggacagttttgttgaaaaattaaaagaagaggaagaaagagaaataatcaaactgaccatgaagttccaagccctgcgtctgacgatgctgcagcgcctggagcagctggtggaggccaagtaactggccaacacctgcctcttccaaagtccccagcagtggcaggtgtacactgagccctggttgctggccccggccggtcacattgactgatggccaccgcctgacgaatcgagtgcctgtgtgtctacctctctgaagcctgagcaccatgattcccacagccagctcttggctccaagatgagcacccacaggaagccgacccaggcctgaggggccaggaacttgctgggtcagatctgtgtggccagccctgtccacaccatgcctctcctgcactggagagcagtgctggcccagcccctgcggcttaggcttcatctgcttgcacattgcctgtcccagagcccctgtgggtccacaagcccctgtcctcttccttcatatgagattcttgtctgccctcatatcacgctgccccacaggaatgctgctgggaaaagcagggcctgccagcaggtatgagatctagcctgctttcagccatcaccttgccacagtgtccccggcttctaagcctccaatatcaccctgtgagcctcgcacagctcagccccaacacagaggtgagaccaggaataaggccacaagtatctcactttctctgcagaaatcaatctttacttcatcagagagacctaaagcgattcttacaaggagcttgctgcaagaaacacggtcattcaatcacattgaggagggtccacatggcattgagagggtgctgcccgctcaatgcccagcagcagctctggaaggcagtgctcagccccatcaccactgtcccgtggatgcctgtgtacctcttgccttttctgggcttgcgtttctctcctctagtgggtggggatgactttcaatgactttcaatacttcccctgaaggaagaatgataaggagaaatgtctgttttgaggaaagggctttgaattccccagatactgaacaatttgtgtttgtgactgatggagaatttcaggaatgaatgagaaagcctttgcgaaactatgcaacagtttacatcagtcatgtgaagtatttgtctaaaacagagcaaactgaagaccaaattattctcctgttgaggtccgtggatggcagatttaaagggaagaaccacaaaggcttgcaaagataggagaggctccatctctaatgcatgtagaagctccttacgggtgcccatcaagagcatagcttggaagccaccatgctgtgcggaactgcgtcagggcaaatgtcacagcaggatttccccaacccagctccatcatcacagacacagagagctgcaggggaggcctgcccactgttttgtcgactctgccctcctctggcagcatagatccttaggtgctcaataaaggtgtgctgtattgaactgaagaagtgagaaaaaaaaaaaaaaaa

SEQ ID NO: 111 - DNA, 4342 bp, Homo Sapiens
gatcaatactgaggccgcgtccgacccccttgagccgagatccccccccagcccagcccccaccccaccccccgcacacgccccaccccccccacgacccagcctcataccgcaccagctgaggcacccaagaggattaccccctggggccctctcccgccccccaaaaaagagaagatcccctctcctggcccatcccttcccttcttccctcccccctccccccgaactttccctctcgcatgcttttcccctgcaccacggatcgcctctcggatgccgcttgcctggaagctgcgttaggagcgagcggcggcggtggcggcggtggcggcggcggcggcagctcgggagtgctatgaccggcaaactcgccgagaagctgccggtgaccatgagcagtttgctaaaccaactgcctgacaatctgtaccccgaggagatccccagcgcgctcaacctcttctccggcagcagcgactcggtagtccattacaatcagatggctacagagaatgtaatggacatcggtctgaccaacgagaagcccaacccggaactctcttactccggctccttccagccagcccccggcaacaagaccgtgacctacttgggaaagttcgccttcgactccccttccaactggtgccaggacaacatcattagcctcatgagcgccggcatcttgggggtgcccccggcttcaggggcgctcagcacgcagacgtccacggccagcatggtgcagccaccgcagggtgacgtggaggccatgtatcccgcgctacccccctactccaactgcggcgacctctactcagagcccgtgtctttccacgacccccagggcaatcccgggctcgcctattccccccaggattaccaatcggccaagccggcgttggacagcaatctcttccccatgattcctgactacaacctctaccaccaccccaacgacatgggctccattccggagcacaagcccttccagggcatggaccccatccgggtcaacccgccccctattacccctctggagaccatcaaggcattcaaagacaagcagatccacccgggctttggcagcctgccccagccgccgctcaccctcaagcccatccggccccgcaagtaccccaaccggcctagcaagacaccgctccacgaacggccccacgcgtgcccggccgagggctgcgaccgccgtttcagccgttcggacgagctgacccggcacctgcgcatccacacgggccacaagcccttccagtgccggatctgcatgcggagcttcagccgcagcgaccacctcaccactcacatccgcactcatacgggcgagaagccctttgcctgcgagttctgcgggcgcaagtttgcgcgcagcgacgagcgcaagcgccacgccaagatccacctcaagcaaaaggagaagaaggcggagaagggcggtgcaccctctgcatcctcggcgccccccgtgtcgctggcccccgtggtcaccacctgcgcctgaggatcgggcccccagatccccacttttcccctccagtgcctcccggctgctagcctgaaagcagcgggaaagccagccacggaggcgtaggggccgcgccctggcctctccatggacgtgcggccccttgcttccccttcgatgcccccggttcccaacctttcacgccggccagcggtcaggggccagggctggaggcgccttcccctcgcggtcccccacttagccaaggcgtgggggcggaaaggtggcgtctagcccgctttgttcagttcggatcgccttgatccaggggccgccgggccgcgccaaggacctgcaagggactgaaggcggagcccatccaaccctcgcccgacccaaacacctcattgtttcccccacgtctccctctataccccctcgaagactcgagagggggagggggtaaggagcgcaccaaagcgcagagcttgctgcccgccgcacgcacgcgcgcctgcgtgcggggatgcgcgcgagtgtgtgcgtgctcgcgtgtgtgtgtatgtgtgtgtgtgagtgtgtgtgtgtgcgcgcgcgcaagcgtgtgtgtttaagactcttgagctgaactgggctgtgtttaccccaaactcttccccacctcgggtccccaagccgctgggagatgtcccatgctgggggtccgcacgtggctggaggaggtggtcttccatccgctctgaaatcatgtttcttagagaaatgcctcggatgccgccgacgcggtgctgctgccgccgcttcgggtttggcccctcagaacccctccttttctgagcgcttccctcttaggcctcagggcagtttgatctgtggggagaaagagcagccatcgctgagcctgccttttaaaatatatgtgtatttccttagccccactctaagaaatctatgttcctgagtttgccccctgccctcccactccttccccttctcccctctaaaccttctcccatctctttcaaaatcttttcccagaaaggcaggcttcaaccagccactccagctttgtgtcttctctcaattacatagcaatttctccttcccaccatcatggggaagctggctctgcttttgccctttgtcatcaccaacacaacagatagaatttaaatataagtatatggtgtgcgtgtgtatgtatgtgtatgtatatgcatgcatgtgtataaagatgcacatgcgtacatatacataacatacacacaatatgtattcctagcaaaataaaatctctaaggtacttggttatccagtgcagtgcaccggaataaagagaatttgtaggcgtatacagctttaaatgatttattttttatgaaaatgttaactgatgagattatatctacatacgtgtgttatgtgtgtggatatagatgcacacatatctgtacatatacatgtgagtgtacatatatacacatatacacatctatgtatggatatgtgtgtatacacatatacacatctctgtccaaaatttcctcaaagatatggggattttttcatgaatccatgtggatgaatgaggtgtctcctttccatacccagtctcaccttctccccaccctacctcacctcttctcaggcacccctcttccccagctgtcctgccagcccttctcgtacagggtggctcctttgaagtggagtaatagggaaggttgctctctgccacagcttgcagcatggtcttgactgaatgtactgttcctgttagcgttacttctcctgtggtcagtaagttgcccagagagaaggaacaaaggtctggagtttacagaatgtctgtttttaaagtcactttatgcgttttccacttttttcttttttaagaaaaagaagtaccatttttgttttgttttgttttgatttttggtggtggataaataatactaaaaggactctagtggaaaggggggatatcgaagagcagggggttgtgaatttccaggtacttggactttttgtagaaggagagagaagaagatgaagtttgccaggagggcccatattttttcagctgaagggtaaaatctttctttgcagagacagtattttgctgaatactttttataatgtgatgattattaaaaaagcaaaaattttggtcacttccaagctagaaggaggaatcagataccctttaatattttttcctcgctccttctggtatatgcatgtcactgcatgataattgagttttcctttgttttaataaaactgttctcagacattaagctaaactaagagaaaaataactttgttgccaaaaggttgtgctatccagattttttatatgtctgcatgtttaaaaaaaaaaagcaacaaaagaaaatgcactctaacttatgtgaactgagagaaaaaaatcaggttttaaacaggaaaacctatggggaatgatattttttgaaagacttttgtataaagttgagtacttagaaaaaagacaaaccagatgtaatatattttgtggatgtttttatttcttggatttatagtaccttatactaaggttaaaaaaatatgcttgatattgtgaaaaggtgaaattcttcaccaacatttcatttgctcctttgtcatattgtaatgccaatataatatagttaatgaaaacagcatttttaaaaaccgaaatattgaaatggtgtaatgttgtaccatttgcactgtgagcaaatgctaatacagtaaatatattgtgtttgctgacaatcagccggcctataaatctccttattttatttcttgtttttatagcataaagctttagtttggcctgaaaaaaaa

SEQ ID NO: 112 - DNA, 5047 bp, Homo Sapiens
gcggcggtcgcagctcgggtccccctcgggcgcccccgccgccgtccgcgcgcggccatggagctggaggtaccggacgaggcggagagcgctgaggcgggggccgtgccctcggaggcggcgtgggcggcagagagcggggcggcggcaggtttggctcagaagaaggcggccccaacagaggttctgtccatgacggcacagccgggccctggccatgggaagaagttgggccatcgaggtgtggacgcatccggcgaaaccacctacaagaagaccacctcctccaccctgaagggtgccatccagctgggcatcggctacaccgtgggccacctgagctccaagcccgaacgcgacgtgctcatgcaggacttctacgtggtggagagcatcttcttccccagcgaaggcagcaacctcacccccgcccaccacttccaggacttccgcttcaagacctatgcacctgtcgccttccgctacttccgggagctctttgggatccggccagatgattacttgtactccctgtgcaatgagccgctgatcgagctgtccaacccgggcgccagtggctccctcttctacgtcaccagcgacgacgagttcatcatcaagaccgtcatgcacaaggaggccgagttcctgcagaagctgctccctggctactacatgaacctcaaccagaacccgcggacgctgctgcccaagttctatgggctgtactgcgtgcagtcggggggcaagaacatccgcgtcgtggtcatgaacaacatcctgccccgcgtggtcaagatgcacctcaagttcgacctcaagggctccacctacaagcggcgcgccagcaagaaggagaaggagaagagcttccccacctacaaggacctggacttcatgcaggacatgcccgaggggctcctgctggacgccgacaccttcagcgccctggtcaagacgctgcagcgggactgcctggtcctggaaagtttcaagatcatggactacagcctgctgctgggcgtgcacaacatcgaccagcacgagcgcgagcggcaggcgcagggcgcccagagcacctcagatgagaagcggcctgtgggccagaaggcgctctactccacggccatggagtccatccagggtggcgccgcgcgcggggaggccatcgaatcggatgacacgatgggcgggatccccgctgtgaacggccgcggggagcggctgctgctgcacattggcatcatcgacatcctgcagtcctacaggttcatcaagaaactggagcacacctggaaggccctcgtccacgatggggacacggtgtccgtccaccgccccagcttctatgccgagcgctttttcaagttcatgagcaacacggtctttcggaagaactcctccctgaagtcctcgccctccaagaaggggcgcggcggagccttgctagctgtgaaaccgctggggcccaccgctgccttctcggccagccagatccctagcgagcgggaggaggcccagtacgacctgcggggggcccgcagctaccccacgctggaggacgaaggccggcccgacctcctgccctgcacgccaccttctttcgaagaagccactacagcctccattgccacgactctgtcatccacatccctctccattcctgagcggtccccctcggagacgtcggagcagccgcggtacaggcggcgcacacagtcgtctggacaggatggcaggccgcaggaggagccacccgcggaagaggatctgcagcagattacagtgcaggtggagcctgcgtgcagcgtggagattgtggtccccaaagaggaggacgcaggggtggaggcttccccggccggtgcctctgctgctgttgaagtagaaactgccagccaggcctcagacgaggagggcgcacctgccagccaggcctcggacgaggaggacgcgcccgccaccgacatctactttcccaccgatgagaggagctgggtgtactccccgctccactatagcgcccaggcccccccggcctccgacggcgagagcgacacataatttctatgcagcccccgacccagagccgagctccacttctgctccggctgcccccgaaggcgctgcccaccccgctgaggcccagagctcgggagatgcccgcctcgccgccccaccggacctcgtcctccccctgcacggatgccgacggccgggcccctccccgacaagcctcccagggccccggcaccccggtcggcagcctgcccctgtgagacccaccctcccgagcggccaatcgcatttgagtccttatttggcacagagacggaagcacgtgtgtgccgttttaggaaaagaacaaaaaagacacaaacaaaccaaccagagggagaagagcccctgcccactgcactctttggttctctgctgtgcctgcctgtgtcctgaggaagaagccaggctgttcgcggtggcctctggggacctgagccccgggggccccatcggcctgcagaggggacggctggggtcccgagcaactctgcctccatccacgtgggaagcggaccctcctgccctcagcttgggtttgggggcctcagtgcaggacatctggcctgaacatcgactgtggggacagccctcgccctgccaagcactgcggccactcagcagctatgttcccgccgcagtggggccctgacgcccacctcccaggtgcccctcgagcaaaaacctctggcgcctccaatccagacccaccacagctggagggccaggcctcctcttccccaggctgccacccacgctggcggagctcagggctggggacttgtccttctcttccaacgtaggccactcagcaactggcatggagggcccaggcaacggagacgttttctccatggcaggacagagcgggaggccgggccttgggccacaggagaccagctcagggcggaaggtcaggctccccgccccctccacgtggagacatggcctagggggccaggcccggctccacaggagtctccttcaggactggtgtggatgtccgccgcctctttcttgtttaagtgatgtgatgtctccgaggaggggagagaagactttgtttccgactcatcaccctccaagagggcagcgctcccagtggtgggactcagcccagactgccctggggcagcttcctgggcccgctgcgctcagagggtgctggttggaggccagagctcggcagagtcacccaccctgcccttccccaggacccctgagaggggcttattggtgatggctgtgggaatcccccacttccaagatgtgcccaggatgtgaggagctggagtggaagctgcacctttgggaagaattcctctccagacctggcagagcctggtgtggggtctgagacggccggagaacctcccaggcagggctctgtgttttgtctgttacaacctccgtatgacgccacgccacccgctgttcacgtcccgtcggcctcctgcacagcccacacgctgcgcccggaaggcccctgctgtggagaagccggacccatccccgaggtccccagcgaggacacacactccacgagagcagcccctccactctgcccaggagaggggccgaccctcctcgggaaccggccagccgcgtggctcccagcatccatcaggacaagcccacgtggggtcctccctgcgtgctcagagggtctgtccagccctgggaagcgaccttggcctcagttcacagcctggtgctcatctgctggcaccgggcatccacccatcagcccccgccctgtccctccgaaggacacccagcaggcaccccccggggaggcaggggcagaggtcagaaggggtgtctgggacctggatggccagcagggacaggggcattgtcatctcaaaggcccaacccccagaggccacaccagtcctcccagggagtcctcgagtcgccctgcccagagccctggcaccagagacgccaagagcctgtggggtgactcggagcagcaggtgtggccccgggcgggcggcaccgcgtccagggcagcctccctccgctgagtgacacgggacaccagtgcccggccgacgcgcctttgcaggagaaatgtgcaaacctctgtggataccatttcatttccattcttgtgttgtctccaaggcccttttggagatatacttggtgttggttgtgttttttggttccttttcagagaactgtaaaccgaggctgacgtgctccactgactgtgccgaggggcgggggcaggaggacggcaagacctatttataatatttagcgaactcggtctccctcagatcccccgcgagggaggctgctggacccaccccgctgtcccccatgatagaagtctgtaaataccttggtgaccaatgcccacttcccctcctgggtcacctctgatggctgctgtccactgagaacgtgggcagtgtccaaattcctgtactgtaaagactaaaaggcgtttgctctgagactgacaaggcggaaacttccatgtgtctcctgccaggctctgtccccctacgccatcccgacacgtccccgttcccccgaaacctggctcagtgcaatactcccattgccatggggtccttcaccatggtactgtctccacagccctcagtccccaccccaggagaggcgcctgccacctcctcctcatctccggtggttcaatcgctccgcctgtccccaacccagtcccatttttatggccaaactgattctgaaacaaaatgaaactgcaaacctcgtgtgtcttaactccccccagggatgccactccattcctccgccccgtggtctggtgcgtgacaatccaaagcgccgagacgagggtgctgtgtccctcaaacccagagtggtgggcgcctctgaaaccatacagccactcctggccccaaacactggtttgcatcccaggttcctcgcccacctacccccgccacaccccgtctttttagagatctctctaataaatcgggtaataagc

SEQ ID NO: 113 - DNA, 3015 bp, Homo Sapiens
gagcccgcgctcggcccgcaggacgtggagaccacgtacttctgcaacacgtgcggacagcccctatgcgcgcgctgccgcgacgagacgcaccgagcacgcatgttcgcgcgccacgacatcgtggccctgggtcagcgaagccgcgacgtgccccagaagtgcagccgtgaaggccctgcagacggccacgcgggaggccatcgcgctgctgcaggccatggtggaggaggtgcggcacagcgccgccgaggaggaggacgctatccacgccctcttcggcagcatgcaggacaggctggcagagaggaaagcgctgctgctgcaggctgtgcagagccaatacgaagagaaggacaaggccttcaaggagcagctctctcacttggccaccttgctgcccaccctgcaggtccacctggtcatctgctcctccttcctcagcttggccaacaaggctgagctcctggacctgggctatgctggcagggggcttaggccccaaggcgctgacggggccccactgcccctccccagtaggaaagatgtcggggtcacccgtccaaaagcccacgctgcaccggtccatcagcaccaaggtgctgctggcggagggcgagaacacgcccttcgcagagcactgccgccactatgaggactcctaccggcctctctgtgcagcacctgcaggcagagatgcagagcctaaaggaccaggtacaggagctgcaccgagacctcaccaagcaccactcgctcatcaaggcggagatcatgggagacgtcctgcacaagtccctgcaactggacgtgcagatcgcctcggagcacgcctccttagagggcatgagggtcgtcttccaggagatttgggaggaagcctatcagcgagtggctaatgagcaggagatttatgaaggttccagacagttggctgccgagtgaaccctctgtccctgagctaacccacatactagcagaggaggaagtcagagtcggccactaaccagatgcaaatccccacactcttccccttagcgcttgaccgtgcctcccagctgctaactggcctcaaatgatgcatgtgaggtcaggattcattgagtagaatgcccccaccaagtgcctccctctttaattagaggtcatcatggaaatggtcgggatatttacgtggtgcctggcttgagtaaaaatctgaagccagatgcttcaggattaagaccccatgctctggccttggccccacagcccagctccatgaccttctccagctgaggcaggagaatgcctacctgaccaccatcaccaagcagatcacgccctacgtccgctccattgccaaggtgaaggagcggctggagcccaggtttcaggcacccgtggatgagcagtcagagagtctacagaacacgcacgacgacagcaggaacaacgcggcctcagccaggaataatccaggaagtgtcccggaaaagagagagaagacatcagagcctaaaggaaacagctgggctccgaacggcctctcagaagagcctctactgaaaaatatggatcatcacagatccaaacagaaaaatgggggcgatgtccccacatggagggaacacccgacttagcaaatgggaccggtccccagggtcaggctcttagagcaggcacaagactgggacactggacagaaggttgttcccatgatggttttttctattttttatttttgagatggagtttcgctctgttgcccaggctggagtgtaatggtgcaatctcggctcactgcaacctctgcctcctgggttcaagcgattctcctgcctcagcctcccgagtagctgggattacaggcgcctgacaccacgccccgctaattttttgtatttttagtagagatggggtttcaccatgttggccaggctggtctcaaacgccagacctcaggtgatccacctgcctcagcctcccaaagtgctgagattacaggggtgagtcaccgcgcctggccaatgttgttgttgtttttaagacagaatttcactctttgttgcccaggctggagtgcaatggcgcaatctctggctcaccgcaacctccgcctcccaggttcaagcgattctcctacctcagcccccagagtagctgggattacaggcatgtaccatcacacccggctaattttttgtattttaagtagagagggggtttctccatgttggtcaggctggcctcgaactcccaacctcaggtgatccgcccacctcggcctcccaaaatgctgggattacaggggtaagccactgtgcccggccggttatttctttaaaaggtaatcatttgtcaagagtaaaacccagaagctctgacaggccataatttcagatcctttggcttgggcagttttgattttccccgtgtttgcatggcatgaagtcttcgtccttgtcacggtagcttgggatgactcccagtccacatggaaaacatcagggagtgacaatccagcaagaaatccctcgctagttccacacctacgcaccgagcgtcggtgtgccaggccctgtgctgggcagagtgtggtatgtcagggtgtgccggttttaggtaacaagactccaccactgagtggcacctgccctattgcaaaggaatccagttcctccggaataacagtcccactgttaacctggtgctactgggaagttccacacagtaatctgagcagtgactcatggaaggatgaggaacgtttgctccagcttctctccctttccagcaagggcagagctcctaaagccaggggttagcacctggccagcttatgtggcagatggtctcagttacaacttcgctgctttcccaaactcctgcagccctcctgagtccgacttccgttgatagcaaggcactgggtggcagcaaccttttttctagtagtttttttcccagcagttttccatttctccacagtatccttttcatttagaggagcttaataaatgctttttaaaaagt

SEQ ID NO: 114 - DNA, 2969 bp, Homo Sapiens
agcaacgacgccgggcagcgggagcggcggccgcgccatgtggctgctggggccgctgtgcctgctgctgagcagcgccgcggagagccagctgctccccgggaacaacttcaccaatgagtgcaacataccaggcaacttcatgtgcagcaatggacggtgcatcccgggcgcctggcagtgtgacgggctgcctgactgcttcgacaagagtgatgagaaggagtgccccaaggctaagtcgaaatgtggcccaaccttcttcccctgtgccagcggcatccattgcatcattggtcgcttccggtgcaatgggtttgaggactgtcccgatggcagcgatgaagagaactgcacagcaaaccctctgctttgctccaccgcccgctaccactgcaagaacggcctctgtattgacaagagcttcatctgcgatggacagaataactgtcaagacaacagtgatgaggaaagctgtgaaagttctcaagaacccggcagtgggcaggtgtttgtgacttcagagaaccaacttgtgtattaccccagcatcacctatgccatcatcggcagctccgtcatttttgtgctggtggtggccctgctggcactggtcttgcaccaccagcggaagcggaacaacctcatgacgctgcccgtgcaccggctgcagcaccctgtgctgctgtcccgcctggtggtcctggaccacccccaccactgcaacgtcacctacaacgtcaataatggcatccagtatgtggccagccaggcggagcagaatgcgtcggaagtaggctccccaccctcctactccgaggccttgctggaccagaggcctgcgtggtatgaccttcctccaccgccctactcttctgacacggaatctctgaaccaagccgacctgcccccctaccgctcccggtccgggagtgccaacagtgccagctcccaggcagccagcagcctcctgagcgtggaagacaccagccacagcccggggcagcctggcccccaggagggcactgctgagcccagggactctgagcccagccagggcactgaagaagtataagtcccagttattccaaagtccatatgggttaatctgctctgacttgttgccattctaacaatttgtgctcatgggaagctctttaagcacctgtaaggatgtctcaagttacagtttgggatattaactatctctgcattcccctcctcccccagacttcagagatgtttttctggcgtctcagttgacatgatctgttgtgcgtcttttctgtcaggtcactcttcccttgggacccgagatcacaccctcatttttcacattattctgtttctgttggagagacagcatataaaacagtattgaaataggctgggagagagcaatgtttctgtgctatattggatgctcagaagtgcaggagacgctggacccaattctctctgctgggtagttaccttatagcatttggggatttgggttagatgatctaaccaggaggccatcactggatggtcacccccccaaaaaaattccatttgagcatcaaaacctgctttgcacaatcctatttgatgcccccagttcagcagagtcagtggccaaagaaaactttggacgtgagtaacacccttcagcagtcgcaacgttattttggttttgtgaaggactctgaaaccatctaccctgtataaattctggctttagaaatttgcccaagaatgctcattctgagagctttcctcagcagcatatatcatcagcctcatcctaaaataggcagggagcccctcccatgagtttatccaagttctcagctcctaaaatgcaggctgccaagaccctacacctgccctggctctacagccacttacctggtttctggactgtcaccctcccagctgacctgcccgtagccaaggaatgaggacctaacttgagttggcccaaagtctgacctggctgtatgtccctgtggcccacacccagcctgtcttgctcattcatgcagcctcaacactggcctccaaagttcccttaacacttgcaaagtcctttttacctgtgcatttggacttgaggacactggtttctatcacaggtgagagccatgttcaatacctccagcaagctctcctggctccctgcactgtgcacgctcctcttcccaaggtcccaataccagcacctctagttagagttagggtcagggtcaggcctctcccaacatcccagtagtttctcctctgagacacatgggcaagagacaatttggagtcaagattttccatttggatctattttaaatcttttagaaatgcatttgaaacagtgtgtttgttttttcccttctagttaagggactatttatatgtgtataggaaagctgtctctttttttgtttttcctttaacaaggtccaaagaaagatgcaaaaggagatcacacccttgccccgctgagccccgtgataacaagtcactccagactaacctgtgtgccagacatttgtgcattgttgcactttgaggttattatttatcaagttcttgaaggaagcagaaagagggactcctctctccctccgtgtatagtctctatgtttgtgctagtttttcttttttttctctgtgtccagtcagccacagggcccgcctccctgcaggaataaggggtaaaacgttaggtgttgtttggcaagaaaccacactgactgatgaggggtaaaatggaaccaggtagagccactccgggcagctgtcacccattcagaacttctttccgcagctgaagaaatgttcagtaacctgtttgacgctaattaaaacagagcctgcaggaagtggggctaaagtggcattcagtgatcctgttctgtagacttttctttctttttttaaccaaatccaaaggatgttacagaaaagctagccactggtattttgttttgttt

SEQ ID NO: 115 - DNA, 767 bp, Homo Sapiens
aagggcccaccgggctcccggggctgccaggccccaaattgaggaagttgactgccagatcacactctgttggcccacgcagatagattccattcatcctttctaatgtctacaccatattttggataacatgccatcatctcacattgtgttgaaagaagaaaccagaatgttggggttgatgtatgccatatggatgaatttaaacagtttcggccttgcaataattggtatacttctaattgcatgtgaaattatactctttttaacgaaagatgaaactattcagtggccacatgtacccagtaacagagggagcaaagcaaatcttatcctcaaagaactgcagctgcttgttagatctacctggtggttccatagagaaactgctcagagaacctgcctttacctcgcctaaaacagaactatcccggagctcagttcatcaactcaggatccagtagtgtaatacagaagcctgttacgagatataaggcacttcgccctcggaaatctcactgtcggaatccttggaaatcacaccacgcacaacttctatttcttcataatttgcaaagaaccagtgtgactccagtcaagaacaaaagattaattgtgaattagcgaagaactctaattttttcaagcagccacatggaaaacgcattctaatgaaatcctttccattgctcttttttcttagttcttcaataaagcatgcgatttgatcacaaaaaaaaaaaaaaaaaaagaaaaaaaaaaaaaaa

SEQ ID NO: 116 - DNA, 4003 bp, Homo Sapiens
gctggcggcagtggccggtgtgagcgcagagccgggccctgggcagcagcggcagcgcggtaggacctcgcgcagcgtccgcgggctccggggcgggggcgccagcggcgaagccccctccccggggaggcgggacctgggggagctcccgagccggggagcggcggcggccgggaacgatgcatcagaagctgctgaagagcgcgcattacatcgagctgggcagctaccagtactggccggtcctggtgccccgtggcatccgcctgtacacctacgagcagatccccgggtccctcaaggacaacccgtacatcaccgacggctaccgggcctacctgccgtccaggctgtgtatcaaaagtttgtttattttatctaatgagacagtaaacatctggagtcatttgctgggtttctttctcttcttcaccctgggaatatatgacatgacatctgtgttaccttcagcaagtgcgtccagagaagattttgtaatttgttctatttgtcttttctgcttccaggtctgtatgctttgctctgtgggctatcatcttttttcctgccatcggtcagaaaaaacatgtcgaagatggatggcattagattatgcaggaatttctattggaatactgggctgctatgtctcaggagtattttacgcattttattgtaataactactggcgtcaggtgtacttgatcacagtgcttgctatgatcctggcagtgttctttgcgcagattcatcccaattacctcacgcagcaatggcaaaggctccgttctatcatcttttgttctgtttcgggatatggagtgattcctactcttcactgggtttggctcaatggaggaattggtgctcctattgtacaggactttgcaccccgtgtaattgtgatgtatatgattgctcttcttgctttcctattctacatttccaaagtcccagagcggtactttccagaatcacttccacggtgaatcagagaagggattgtaccactcgtcacgtgtgttgggaaagaagaaagggtgagaaaccctggcctaaacaatccatcccacagatcctcaggcattcctttgtgtacttggtttttcaccactgagctttaaataagaatggaaatacaagggaaaacctgcgttgtaaacatgaggatttgggaacagatctaggacatgccactgaattgaagaccacccatcttccaggcagggccagaattacagaaaacaattctggacaactaaactacctcggatcaagccaccaaatatggcatatccttgcagtagtgatgttatattggtggcatcagtcaacagtgtatgtcatgcagtacagacatagcaagccttgtcctgactatgtttcacatttgtgaattaggtatggccacctggtgaattcagttgttaagcaatatataatggggaattgtataccccactatttctaagattcccattagttttccctttttcctttttaatatgagtaatgctttataaaaatgggaaaaaaagtatacttaaggatctgtagtaataactgctttacaaaatccttaaaactactaatttgctgcttgtacagaaagtgaaaattagttggcaatcataagaaacatctgaataacaacgatgaatgggaaactagtgttgaaataggattcattttacttagcaccagcttaatttccttaggaagggctcatctccattagaaaatggagtcatcttatgtgcttaattattttcagttaattgtcaagtttaagtgcctaatcaaggcaagtgttgtttcagcctatgcttaatgcaagctaggatagtgattttaaataatcactaaaatcactagatttaaataatcactaaaatgatttgtgagaaactggcacttcagatattatatcctttagctataggttcttctctccctaagaacattagatattttagttttccagaacaaaagctttaaacttctgcagtaagttgagagaagggttgagaagaggaaaagaacttctcattttctatcagataagaatcacattagaaactaagtacaagattagacaacaaattatgtggtcaaataatatagtcattagccacctaaacattttaattccagatattatttaattccatataataactgaattcttgtgagtggattacaggtttttgatcccaaaattccagagctttcaactctctgaatttgtagtcctgaatatcccagtggtgggggttcccagcattgtgggtgctacttgcaaggccatagaatctagatggccctgtcttgaccctgaaatgaaccttaagccttagaacaaagtcatgcagatgccccatttgataataatcttattcacctgtgctctggtcctcggtttctgcatgtgttagcattgcattgataactcagaatcttgataaacacttaatatttgggcctgaagcattaaactttctttttattgtatatacttaaaaaatagaactcactgccctatcatacattgtagccctcttattctttggtctttcatatgcattagttaaatcccttaaagtagacattcataaaaacttacattgtttattggagtataaaatattacccaagtttcttcatgagttgacatgagctgttttaaatactggtgtattttcagaacagtaaaattactgaatatcagaaaaaatgttaattgatgatgaagcttattcccaaaatgccttttgtgcatatgatacttggaaagtcactaatgtgcctcagttaatacatcagtaaaatgttgtgtttcttttccagtgtagtgtttttggaatataaattccccatgctagtatagtatctcagcaaagagaatttccccccaggaggctcagtaaaggaataccgtgtcttacccatcgttatgatggaaggctgctttgaaaatggctgttttaccttataaggttaaaattttgatccatatgttaagtgatagaagattttggtgcaacagtagtaggatatatttctcctagaacatcccttattggcttacatgattttattgccttttaatagatattttgtcattttggccaaacaaaagacactgagtagttacacttaagttaaaaatgaggggaaaatcattattttaggtgtggagccatttttattataaaactttctcaataaaaaaacattgaatcatttcaatttttgcagtccctgtattagtatatgaatacatacttgccatttgaattaataacatgaaaagagtatactgtgtttttaaatccgtgtttctttgaatttaaagggtgtacaggtctttctgtagggaaaattattccatgtaaacatttcaactctgtatgaaaatgttaaatattgtaagaaagttatcctctcattttttcactgctatgatatatttattataaaatagggaatgaatgaatgaatatggattgctgttaactagaaacacttctgtatgtcagtcagcatttaatgaccacctactgtgtgcacagcactactggtaaaattttgaagacattgttaacattaaaaaatattttaaagttgtctacaaatctgagccttgtaatgatgtatatttaagttatttttgtttttatagattaaagtaagattatactatccagttttattactaaaaaagactggttttaattttaccaatgtgtgaactataaaagctttttgcctacagattttacattttaaagttatctatggctgttttaaattgtctagcaatttatatggttgtggttaactcatttaagaaacaattatctttctatattaagccattttcaaatagcaagacagtgcttgtctttttttgttattacactaactgcaattcagtaagctgcatgacaaaatatgtattatgtaaataaactgggtttactaaataaaaaaaaaaaaaaaa

SEQ ID NO: 117 - DNA, 3957 bp, Homo Sapiens
ccgggtttggagactcctgcgtcctccgacttttcatggaagagatgtcaggagaaagtgtggtgagctcagcggtgccagcggctgctacccgcaccacttccttcaagggcacgagccccagctccaaatacgtgaagctgaatgtgggtggagccctctactataccaccatgcagacgctgaccaagcaggacaccatgctgaaggccatgttcagcgggcgcatggaagtgctcaccgacagtgaaggctggatcctcattgaccgctgtgggaagcactttggtacgatactcaactaccttcgagacggggcggtgcctttacccgagagccgccgggagatcgaggagctgctagcagaagccaagtactacctagtccaaggcctggtggaagagtgccaggcggccctacaaaacaaagatacttatgagcctttctgcaaggtccctgtgatcacctcatccaaggaagaacaaaaacttatagcgacttcaaataagccagccgtgaagttgctctacaacagaagtaacaacaaatactcatataccagcaattctgacgacaatatgttgaaaaacattgaactgtttgataagctgtctctgcgctttaacggaagggtcctgttcataaaggatgtcattggggatgaaatctgctgctggtccttttatggtcagggccggaagattgctgaagtctgttgtacctccatcgtctatgccactgagaagaaacagaccaaggtggagtttcccgaagcccggatttatgaggagaccctgaacattttgctgtatgaggcccaggatggccggggacctgacaatgcgctcctggaggccacaggcggggcggcggggcgctcccaccacctggacgaggacgaggagcgggagcggatcgagcgcgtgcggaggatccacatcaagcgccctgatgaccgggcccacctccaccagtgagcaggcaagagaccgagccgccctcctctcaccgcccccactccctgccgtgctacacccagatcctgtgcaggctgccgggccccttctgcttcccttggagcctggagatacttttgtaacaagccagatgattattttggtattgcttgacaaggcaaattgattgtcttgacccaggcgtatgacccctgtcgttgaacaagctgtgtctaagatctctacttttcatgagaatctgagactctttggagccaggctttctcggttctcagaggaaaagtatgaatgagtgtgaagtgtatgtgagaacttttgtttgcaatatttatttttgtgggtgtcgacttcctatgtgggctttttgggtgacactcccttaagggttcagtttgacaattctgagagttgtcctgcagttggaggccaccagaggtatctgagctccctgcttcctatttcataatcctccagccccagcaggtccactcctggttcctgtgtgtttggcccgggcacaatccccactgctttgctagacgtgctttctgccatgtggctttgggcctagagcttgttgataattgcagcttgtggcagtggaaatatggctgaatgagtgtctaaatcgttgagaccagtgcaactttgggtgcaaggctttgtttagggatcaagccttttgccaccttgggctggtctttggcctggtgctcactgggaccccatatgtctgcgtaggagcagaactttccatggcagtaagtgtccagctctgtttctggttctttccccaactccagccccgtccagttgttctcctgattgacccgactccactccaggaaggccatctgaccctgtgacaggcatagctcataaactacccctccctgggatcccgctcctcttcagcctccttccccatgaagctgggctaactttctaagtcattttgcttagaaattcagtgtggcccataccctttgtcctcccagcctggcatccaggcagggacaccctcacaccaccagccccagggagcttccctgctataaacacagacccccttgtctttgcctctgatttttacacagtgtagagtggccagcagtgaacaggttgaggatgtgcgggtagatagataactttgggtctggtttgtgtctgtgttcatgtttgtttaagggatgtgtgactgtgggtggggacgtgtgcttgtggggcacaggtggcccctgctggagcccggctgggcgcagcgcctatgtaggacgggtgttctcagtgacctacctcccaggctcctctgcacctgcaaaggaacaggagtgagtcgtgactgacaggggtggttgagactagactaggtagagtagttaccaggagatgtgaatgtgcgtcaggtgatggatgggtttgtcaagggaatcgttaccgttttataccaaaggtattaacatgggcagcctttgacacatgtattccaaaaacgagtttatattttcaaacggtttttacagcttagactttgtacttactgccctgcctgtgacagttgtatgccttcattttgtatccaacagcaaagtctacaataaaactttaaaacaatcatgactgaatgtcaaaatcgtgtattgggcagatgctttttaaactgtcgtgtgagaaacttttatattaggccatttggattttattaagtgctaaggaaagagggcttacaaaatgtttcgtaaatattttatactgtttaagtgttaaacaccaaccctgtctttcttttgggttgagcttttttagaaagtcgaagtgaatgttggccaggaaaatggaaaagccattgtataaatttttttttgaggcggagtcttgctctattggccaggctggagtgtagtggcaccatctccacttaccacaacttgtgcctcctgggttcaagcgattctgctgcctcagcctcccgagtagctgggattgcaggtacccatcagcccatgcccagctaattttgtatttttagtagagatggggtttcaccatgttggccaggctggtcttgaactcctgaccctgtgatccgaccaccttggcctcccaaagtgctgggattacaggtgtgagtcaccacacctggctgcatagtgttttaaatgtttgtgtgaagaatgagtttgtggaacaatttgatttgctgtggcctctatgcctaatgagctagtgtttctggcagctctctctacccaactttgcacttgtagttttgagtctttgtctctctggaatatgaacaggtttataaaacattccatggtgaacaattctgtcggctgcattatagccatgagtgaatagacagcattggctggtccaagctctgttattgagtatacaaggaactgatttttcttatgttagcactaagggcaaaaaccaatatttataatgtaagcactatccaggtaaaacactggcccaagatttggtaaagagatttcattgcaatgtaataactacagttttttacaaattggaacagctttggtgtgtcgtaatcaagggttttttttgtttgtttgtttcaaataagccatctgattgtggtgactggggcccatgtccaagacaattcctggcatattctgtcaccctcccgtggggcgatcactgtgtggggaccccattccccagttaaagtgtgtctctgtaccttacaacagcgattcaggacccaagtgtgaacaacactcagcccgccctctggagcgtgtgctgtctttagggctctacccaaagtcactgtaacagttaagtgtgtcattaacctttctgtctctttgcgccataaaaaaatgctcaaagttttagatgtagccactgtatgttgtacaaacgttggcgacatgtaaaataaaagtcataaaatgcaaaaaaaaaaaaaaaaaaaaaaaaaaaaaaaaaaaaaaaaaaaaaa

SEQ ID NO: 118 - DNA, 2912 bp, Homo Sapiens
ataaaccctgagatatgagggttgggcgagacatccgagcctgtttcgttccgtgttgggaccaggaataaccctgacttctgagctttcataaccccagggtcctccagaaaatttgcggcgcgctgagggaaaaccttgctgaagctgtacattggaatgcgtttacagtcattgtaatggaagcaaaatacatgaaggaaaaactgttatttgtatccctgcttattgcacctgacgactagttgcagatggttttgtttacctaagaaaacttgtgatataaatgaaaaaaacacctgttttcctagagtcattggttacaaatatgcttcgtctaagagctatttgtccattctcctggagagtgtttcaatttcgacccatcagttgtgaaccactaattattcagatgaataagtgtacagatgaggagcaaatgtttggttttattgaaagaaacaaagccatactttcagaaaagcaagtgggatgtgcatttgatatgctttggaagcttcaaaagcagaagaccagcctgttaaaaaatgctgagtatgtcagagaccatcctcaatttcttactcttcataatttagctacaaataaattcaaattaatgaatgacgataccctggtgaatgtgttatacgtcacacaacagtttgctggtgaggcccatgacccgctagttgaagcactagttacagaagcatggagaaggctagaaaggtttgatattaaactgctctcagaattttcctcttgcctagcagatcagcatttgtattttagtccattaatgggaaaaatagctgatattgttcataggaacttggaaaccacacaggacttaagttccttgtctgtcttgatggtcaacatatcttctttaatatcacgacattttcaacaacaactgatgaacaaaacagaacttctttttgacaccatagattcttctgaggccaacgttgcaaaaagcatagcaaagtttcttcgaaatgttagatatcgttatcaaccactattagaaagatgtaataacgtatttttaagtaatgtggaccaccttgatttggattccatcagtaaaatacttagtgtatacaaatttctacaatttaatagttttgaatttattataatggctaaaaagaagccaactgaaatgattcctctgtgtaatcatcctgctagctttgtaaaattgtttgtagcattgggacccattgcaggacctgaagaaaagaaacaacttaaatcaactatgttattgatgtcagaggacctaactggcgagcaagccctggcagtgttgggagcaatgggagatatggaaagcagaaactcatgtctgattaaaagagttacttcagttctgcataaacatttggatggctataaaccattagagttgttgaagataactcaagaattgacttttctgcatttccaaaggaaggagttttttgcgaaacttagagaattactgcttagttatttgaaaaatagtttcataccaactgaggtgtctgttctggtccgtgctatttccctgctcccttctcctcacttggacgaagtggggatatcccgaattgaagccgttttaccacagtgtgacctaaataacctgagtagttttgccacatctgttttaagatggattcagcatgatcacgtgtatttggataatatgactgcgaaacaactgaaactacttcaaaaattagatcactatggtcgtcagagactacaacacagcaacagtttggatctgttacggaaggaacttaaatctctcaaaggaaacacgtttcctgagtcacttcttgaagaaatgattgctactttacagcatttcatggatgatattaattacataaatgttggggagattgcatcttttatttctagtactgattacctcagtactttgctactagataggatagcctcagtggctgttcagcagattgaaaagatccatccttttacaatccctgctattattcgtccattcagcgtattgaactatgatccacctcaaagggatgaatttttgggaacttgcgtgcaacatcttaattcttacttaggtatattggatccttttatattagtgtttcttggtttctctttggccacacttgaatattttccagaagatctgctaaaggcaatttttaacatcaaattcttagctagattggattctcaacttgaaattttatctccatctcgaagtgcaagagtccagtttcatcttatggagttaaatagatcagtctgcttggaatgccctgagtttcagattccatggtttcatgaccgcttctgtcaacaatataataaaggtattggtggcatggatggaacacaacagcagatttttaaaatgttagcagaggtactaggaggaatcaattgtgtaaaagcctcggttcttacgccttattaccacaaagtagattttgagtgtatcttggataaaagaaaaaaacctcttccgtatggaagccataatatagcattgggacaactaccagaaatgccctgggaatcaaatatcgaaatagttggatcaaggctgccaccaggggctgaaaggattgctttggaatttttggattcaaaagcactttgtagaaatatccctcacatgaaaggaaaatctgctatgaaaaaacgacatttggaaattctggggtatcgtgtaattcagatttcccagtttgaatggaactctatggcactgtcaacaaaggatgctcggatggactacctgagagaatgtatatttggagaagtcaagtcatgtttgtagtttttatttaaaatgaatgtcatcgtgtgttacatttggacctattttaataaagggcctgtctcaaaaaaaaaaaaaaaaa

SEQ ID NO: 119 - DNA, 551 bp, Homo Sapiens
accccatccgctggctctcacccctcggagacgctcgcccgacagcatagtacttgccgcccagccacgcccgcgcgccagccaccatgctaggtaacaagcgactggggctgtccggactgaccctcgccctgtccctgctcgtgtgcctgggtgcgctggccgaggcgtacccctccaagccggacaacccgggcgaggacgcaccagcggaggacatggccagatactactcggcgctgcgacactacatcaacctcatcaccaggcagagatatggaaaacgatccagcccagagacactgatttcagacctcttgatgagagaaagcacagaaaatgttcccagaactcggcttgaagaccctgcaatgtggtgatgggaaatgagacttgctctctggccttttcctattttcagcccatatttcatcgtgtaaaacgagaatccacccatcctaccaatgcatgcagccactgtgctgaattctgcaatgttttcctttgtcatcattgtatatatgtgtgtttaaataaagtatcatgcattc

SEQ ID NO: 120 - DNA, 1531 bp, Homo Sapiens
ccggcccacgccagctcccggccgcggcacagcagccccggcgctccccgcgccgccccgcgcaggcgcccccgccccgccgtcgccgccgccgcagccaggagccgctgcaccatgccccgcatagatgcggacctcaagctcgacttcaaggatgtcctgctccgacctaagcggagcagcctcaagagccgagccgaggtggatcttgaacgcaccttcacgtttcgaaattcaaagcagacctactcagggattcccatcatcgtggccaacatggacactgtgggcacgtttgagatggcagccgtgatgtcacagcactccatgtttacagcaattcataagcattactccctggatgactggaagctctttgccacaaatcacccagaatgcctgcagaatgtagccgtgagttcaggcagtgggcagaatgatctggaaaagatgaccagcatcctggaagctgtgccacaggttaagtttatttgcctggatgtggccaatgggtattcagaacattttgtggaattcgtgaaacttgtccgtgccaaatttcctgaacacaccattatggcagggaacgtggtgacaggagaaatggtagaagagcttattctttccggagcagatatcatcaaagtgggagttggaccaggttctgtgtgcaccacccgcaccaagacgggagtggggtacccccagctgagtgccgtcattgagtgtgccgactctgcccatggcctgaagggccacatcatctctgatggaggctgtacgtgtccaggggatgtcgccaaagcctttggagctggagcagattttgtcatgctgggaggaatgttttcgggtcatacggagtgtgctggagaagtgattgagaggaacggacggaagctcaagctcttctacgggatgagctctgacaccgccatgaacaagcacgcaggaggagttgctgagtacagagcctctgagggtaagactgtggaagttccttacaaaggagatgtggaaaacactatcctggatattctcgggggactgaggtccacgtgcacctacgtgggggccgccaaactcaaggagctcagcaggagggcaacattcatccgggtgacccagcagcacaacaccgtgttcagctaaccctggggacaaagcagcgtctggctcgagtggaagcgtccaaacctgcttttcccatctccccccaagtctgttccgtcagagcttctggctgctcctgaatggtggaatgctgtgtcctctcttctgtctcctgccgcctggaggcttcggggctctcccgcctgccttgtcggggcccagacgcaaggcaccgattgggccaacatcagagccctgctgcccagaactcataacctcattgttcaaaccaacacttgcacctttctctttttctctttctctctccctttctttgtttttctttcttttttaaaagaagatggtttcactttaatataatgctattatcttaagacttaaaaaaaaaaaaaaaaaa

SEQ ID NO: 121 - DNA, 2297 bp, Homo Sapiens
ggaggctgtgggaggtgttggcggcggcggcgcgggcgcctgaggaggaggaggagaagcggatgagatcgtggggctcaccagcgtcccccatggcttctgagtagcgtgggagtggagtcagcaccaagccaggctccccgcgcctgccttgccctcacctgctcctgctctctgccagaggcagcatggtccgcagggcaccatggggcccgacagagtgacagcacgagaactgtgcgagaacgacgacctggccaccagcctcgtcctggacccctacctcggtttccgcacccataagatgaacgtcagccctgtgccccccctgcggcgacagcagcacctgcgctcagcgctggaaactttcctgaggcagcgggacctggaggctgcgtaccgggccctgacgctgggaggctggacggcccgctacttccagagccggggcccgcggcaggaggctgccctcaagacccacgtctatcgctacctccgtgccttcctgccggaaagtggctttaccatcctgccctgcacgcgctactccatggagaccaacggggccaagatcgtgtccactcgtgcttggaaaaagaatgagaagctggagctgctggtgggctgcattgcagagctgcgggaggcagatgaggggctgctgagggccggtgagaatgacttcagcatcatgtactcaacccgcaagcggagtgctcagctgtggctgggcccagccgccttcatcaaccatgactgcaaacccaactgcaagtttgtgcctgcagatgggaacgcagcctgcgtgaaggtgctccgggacattgagcctggggacgaggtgacatgcttctacggcgagggcttcttcggcgagaagaatgagcactgtgaatgccacacctgtgagaggaaaggtgaaggagctttccgaaccaggcctagggagcccgcgttgccaccacggcccctggacaagtaccagctgcgtgagaccaagcggcggctgcagcaaggcctggacagtggcagccgacagggcctgctgggccctcgggcctgcgtgcacccatccccgctgcgccgggacccattctgcgccgcctgccagcccctgcgcctgccagcctgcagcgcccgcccagacacctcacccctctggctccagtggctgcctcagccccagccccgagtgcggccccggaagcgccgacgcccccggccccggagggccccagtgctctccacccaccacgctgcccgcgtctccctgcaccgatggggaggctgtggcccccactgccgcctgcgaggagaggccctggtggccctgggccagcccccccacgcccgctgggcccctcagcaggactggcactgggcccggcgctatgggctgccttacgtggtgcgtgtggaccttcgtcgcctggccccagccccaccagctaccccagcccctgctgggaccccaggccccatcctgatcccgaagcaggccctcgccttcgcccccttctccccacccaagcgcctacggctggtggtcagccacggctccatcgacctggatgtcggcggtgaagagctgtgacaggccggacggggaggcccagcagggagagagggtctctctcctagctgctacccaggacctccagaaggagcccttggacctctgggagggagctgacccttgactccagcatagctctgaccctggaatggggttggtttggacacccccagggatctgagccctgaccctttgtgactgctgacccctgagccacccccactcccacagggagccccggccatttgctgccctccccacccctgccccagcctcaggactgcaggagccatccgcccccctcagccccttcctccccagggagcaaagccataaggggcaggggccaccccacggcatctccccagaagtacaggcctcaggaggaggtggaactgatgtagggggtggcactccccagagactgccctcacgaggggactgggttcgctctcagctctgcagctgtctgcggtggggggaaggttggggggtgtctggaggcatgttcccctcaccaccccccgtgggtctcagggaggccgggtgtgacctcatctttctcatggtgctatcctggtgctattggggtggggagttccctcccctcccccacaccagaaaggggtatgttgggggattggaagcacttgaactttttattttattaaaaccttgttataagcagcaaaaaaaaaaaaaaaaaaaaaaaaaaaaaaaa

SEQ ID NO: 122 - DNA, 3473 bp, Homo Sapiens
ggccggcctggtcgccagcctaacccggcacagtgagcggagcgcctgggcggcggcggcggcggcgtgatggctccggccgcggaccgagagggctactggggccccacgacctccacgctggactggtgcgaggagaactactccgtgacctggtacatcgccgagttctggaatacagtgagtaacctgatcatgattatacctccaatgttcggtgcaattcagagtgttagagacggtctggaaaaacggtacattgcttcttatttagcactcacagtggtaggaatgggatcctggtgcttccacatgactctgaaatatgaaatgcagctattggatgaactcccaatgatatacagctgttgcatatttgtgtactgcatgtttgaatgtttcaagatcaagaactcagtaaactaccatctgctttttaccttagttctattcagtttaatagtaaccacagtttaccttaaggtaaaagagccaatattccatcaggtcatgtatggaatgttggtctttacattagtacttcgatctatttatattgttacatgggtttatccatggcttagaggactgggttatacatcattgggtatatttttattgggatttttattttggaatatagataacatattttgtgagtcactgaggaactttcgaaagaaggtaccacctatcataggtattaccacacaatttcatgcatggtggcatattttaactggccttggttcctatcttcacatccttttcagtttgtatacaagaacactttacctgagatataggccaaaagtgaagtttctctttggaatctggccagtgatcctgtttgagcctctcaggaagcattgatgaatcattccaccaagaaaacaaacaagcacctaccatagacctggcagaataaataaggaaatccttaaagatctacaagttcaaatatgtcatgaccatcacagcagaggagtgactttctgactaatgctgccacccacacagagaataaggagtagggcctgctgggtgtttagctcatggctttatcttatttgtccccctcctcctttcacgctccagtttataaagaaacagagatgatgtgtgtgtatgcctcaaatgcagaaacagttgggcttttcttaacaggttaacagtttgtgctggttataagaaattaaccttcttttctttttgccaagggttgcatgtgaattatacctttcttaatatttgattaaataatgcagtcagctaagagccaacaaaaccccatatccagatagttagctgtgagccagcactcagctgtgtcagatttgattaatattgtattaatctcatggatggttctcaaaggtaaaaaaagagagagaaagagagagagctagctgtgggattctgtgtagttcttcactatctgttccagggctagtcggaggatcataagcaagctcagacctgcccccagttcagtacttgaccacatcccaggatttatggtgtctgtctatggccacagccaaccagaatgagtgggtcatcttataacctttctgaagctccatgaggacatgtatagaatgctgcaccttcagccagctctgctctgatctttgcagatctttaagttgtcactgtttctacggctagacaaatatgactggtggtctagactacccatagttcatcctcctcacataacttatttgaagttgtcagggaatgccattacactctgatttttaaattatgcagtattttccagttctcagagaggtcatggttgtacccaagggaagtgtgttgcattaactaaagctaaaattatcagaatcctatttacataaagcatattaaaatatctgctccttaattttctgaaggaaatagatgtaagtttctgctacttgaaacctacagaaccgacaaaaattagggtgctaaaaaaatgacagtgaaatctcatcgtaaggcagctagttctaatttgcatttgaatgtataacaaattgcatcacttttcacaaacttaacacctgcctggagtaaaaatctgatttgacccctctgctcatgtttcatcatatttgtagctctgcatcatttagcatttttatgactttttttgctttatataaattattgtaaaatccagattgtttttaccacatgatgacgtgactcaggattaaatcctgagctacagtttcaaaaggaaaatcatttttttcttatgcaaagatggtaaaacactgttgtcattttttccagtattcaataagtagcctttgtacaaatttaaaaccaaaaactattctgttgtttttcttcacctactagccttagtttttaaccaagtatccaaggatgtcaacttgacatccttcccttagcatgccaacaagccattagactgattcttccacctacttttatgaacctccaggaagaaaaacacttgccaaaacattaagagaactttgattctgccttaagagggtatagaactaaaccatttgaaggcacagcccataagactatacttgattttgccccaagattctgacttctggctacatttcacctgcagttacctgggctatcggccgtgatacattttttaattcatttgttttccaccattatatttttatacttttcagttagatatacttctgcataaagagtatatatacagtgtaggataaaggcatatcgtacatggcaatgctgttaaacatggtaagactgaggttctgcaggattaaagtcagattaagggtacagaaagcacaccttgatactgaggccatttagagcaatttgtttaatgagtggttcagccatcaccaccagtggccacctgttcaataaaattgcctagcaccacagtggagagtcatctacaccccaaggtgagctgtaagactggccaattctttgaagacctttttttctgttgggagaatggaaagcagaaagggaagccaggctctttaatgttccaagtcagctgtgcctcacacaaggctctctttttagctactaagtaacatactcaagactttgtatctgtgcagcattttatggaaatcactggtgacctataggatattactaaattatttcaatagctttatttttttcctacttggattctaggtggacattacagagttgaattcctcactaccccctcccgctgtcatttgttttattggaaaacttcatgttaactagagtgtacaaaaagtctgtttcctgctgagccaatagtgatttgtttgcatatcacctaatgtgaaaagtgctcatctgtgaactctatagcaaattatattttagaaaatactttgtgaggccgggcatggtggcagagcgagactccgtctcaaaaaaaaagaaaagaaaagaaaatataaggatgtaaaagaaaaaaaaaaaaaaaaaaa

SEQ ID NO: 123 - DNA, 2684 bp, Homo Sapiens
cccgagaggagtcggtggcagcggcggcggcgggaccggcagcagcagcagcagcagcagcagcaaccactagcctcctgccccgcggcgctgccgcacgagccccacgagccgctcaccccgccgttctcagcgctgcccgaccccgctggcgcgccctcccgccgccagtcccggcagcgccctcagttgtcctccgactcgccctcggccttccgcgccagccgcagccacagccgcaacgccacccgcagccacagccacagccacagccccaggcatagccttcggcacagccccggctccggctcctgcggcagctcctctgggcaccgtccctgcgccgacatcctggaggttgggatgctcttgtccaaaatcaactcgcttgcccacctgcgcgccgcgccctgcaacgacctgcacgccaccaagctggcgcccggcaaggagaaggagcccctggagtcgcagtaccaggtgggcccgctactgggcagcggcggcttcggctcggtctactcaggcatccgcgtctccgacaacttgccggtggccatcaaacacgtggagaaggaccggatttccgactggggagagctgcctaatggcactcgagtgcccatggaagtggtcctgctgaagaaggtgagctcgggtttctccggcgtcattaggctcctggactggttcgagaggcccgacagtttcgtcctgatcctggagaggcccgagccggtgcaagatctcttcgacttcatcacggaaaggggagccctgcaagaggagctggcccgcagcttcttctggcaggtgctggaggccgtgcggcactgccacaactgcggggtgctccaccgcgacatcaaggacgaaaacatccttatcgacctcaatcgcggcgagctcaagctcatcgacttcgggtcgggggcgctgctcaaggacaccgtctacacggacttcgatgggacccgagtgtatagccctccagagtggatccgctaccatcgctaccatggcaggtcggcggcagtctggtccctggggatcctgctgtatgatatggtgtgtggagatattcctttcgagcatgacgaagagatcatcaggggccaggttttcttcaggcagagggtctcttcagaatgtcagcatctcattagatggtgcttggccctgagaccatcagataggccaaccttcgaagaaatccagaaccatccatggatgcaagatgttctcctgccccaggaaactgctgagatccacctccacagcctgtcgccggggcccagcaaatagcagcctttctggcaggtcctcccctctcttgtcagatgcccgagggaggggaagcttctgtctccagcttcccgagtaccagtgacacgtctcgccaagcaggacagtgcttgatacaggaacaacatttacaactcattccagatcccaggcccctggaggctgcctcccaacagtggggaagagtgactctccaggggtcctaggcctcaactcctcccatagatactctcttcttctcataggtgtccagcattgctggactctgaaatatcccgggggtggggggtgggggtgggtcagaaccctgccatggaactgttttcttcatcatgagttctgctgaatgccgcgatgggtcaggtaggggggaaacaggttgggatgggataggactagcaccattttaagtccctgtcacctcttccgactctttctgagtgccttctgtggggactccggctgtgctgggagaaatacttgaacttgcctcttttacctgctgcttctccaaaaatctgcctgggttttgttccctatttttctctcctgtcctccctcaccccctccttcatatgaaaggtgccatggaagaggctacagggccaaacgctgagccacctgcccttttttctgcctcctttagtaaaactccgagtgaactggtcttcctttttggtttttacttaactgtttcaaagccaagacctcacacacacaaaaaatgcacaaacaatgcaatcaacagaaaagctgtaaatgtgtgtacagttggcatggtagtatacaaaaagattgtagtggatctaatttttaagaaattttgcctttaagttattttacctgtttttgtttcttgttttgaaagatgcgcattctaacctggaggtcaatgttatgtatttatttatttatttatttggttcccttcctattccaagcttccatagctgctgccctagttttctttcctcctttcctcctctgacttggggaccttttgggggagggctgcgacgcttgctctgtttgtggggtgacgggactcaggcgggacagtgctgcagctccctggcttctgtggggcccctcacctacttacccaggtgggtcccggctctgtgggtgatggggaggggcattgctgactgtgtatataggataattatgaaaagcagttctggatggtgtgccttccagatcctctctggggctgtgttttgagcagcaggtagcctgctggttttatctgagtgaaatactgtacaggggaataaaagagatcttatttttttttttatacttggcgttttttgaataaaaaccttttgtcttaaaaaaaaaaaaaaaaaaaaaaaaaaaaaaaaaaaaaaaaaaaa

SEQ ID NO: 124 - DNA, 2094 bp, Homo Sapiens
tgaccgctgagggtgactgtgctgtgaggcccgccggaggcaccagaaggcacaagcctcccactgcccctttccccgccaagtcccgcaggtctcgcagtcgcgggcgcccccaccccacccctgcccaaggccagggtcgcagtcccaccgggtgacggcagtcgcgctccgcgtggggcagcggcgagcggaaagggaagccgggcggggccagggggtcaaacacgggcgacagtcccgcccagccccggacctgcagcgcgcacaagctcgggcgccctccgagcgccgcgcccaagccccgcccctcccgcttcccgggctccgattggccgagccaccgcgggggcgtgtccggcggagctggccgggacccgggcggagcgggcggggacccgggctactgcggtgtggactcgagggctgggcgcggggccggcgcagaagccgccagctggagacgatggtggaccacttggccaacacggagatcaacagccagcgcatcgcggcagtggagagctgcttcggggcctcggggcagccgctggcgctgccaggccgagtgctgctgggcgagggcgtgctgaccaaagagtgccgcaagaaggccaagccgcgcatcttcttcctctttaacgacatcctggtgtatggcagcatcgtgctcaacaagcgcaagtaccgcagccagcacatcatccccctggaggaggtcacactggagctgttgccggagacgctgcaggccaagaaccgctggatgatcaagacggccaagaagtcctttgtggtgtcggccgcctccgctacggagcgccaggaatggattagccacatcgaggagtgcgtgcggcggcaactgaaggccacgggccgcccgcccagcacggagcacgcggcaccctggatccccgacaaggccacggacatctgcatgcgctgcacgcagacgcgcttctctgccctcacgaggcgccaccactgccgcaagtgcggcttcgtggtctgcgctgagtgctcgcgccagcgcttcctgctcccgcgcctgtcccccaagcccgtgcgcgtctgcagcctctgctaccgcgaactggccgcccagcagcggcaggaggaggcggaggagcagggcgcggggtccccaaggcagccagcccacctggcccggcccatctgcggagcgtccagtggagatgacgatgactccgacgaggacaaggagggcagcagggacggggactggcccagcagcgtggagttctacgcctcgggggtggcctggtctgctttccacagctgaccccgggcctgcagaacatctgtccccaagccagctccactgcccaggcccccaagagggcagctccagaagctgcccagggctccgggaccccatcccatggtggcaggtgcagcggtggggagtggctctttctggactcccagtgcctttttgctggacactgtgtccttatggcttcactgcaggtaatgcctttcccttcaggaagccccagaacacccacaggtcttggtaacaaacgccaccttacactctgcaggctgcagcggcagctccagatggcctcctgagctggacgaccccaggtctccagacatctagggaccagagcaggtttgggaacacagagggaagacaggatgggagtgtagccacagaacccacctgcaccctgacaggcacaccccactgaagagcctgagtcccaggaggcctcctggaagcccaggactgcccacccaccacgctggtgcccaccgccttggccagccaagccctgccgatcagacatgtgggctccccgaagcccagccagagactgccgtgctgtgggtgccaccaggcccagggactgcagcctgagctccccgaggcccagggcagccgggtgaggactctgtcctgtgtcacctctctccaggtgtccagctgtctcatgcctttttgtcctgtcctcagctctccgtgtggtcagcgaaaccattgttttctgttaggactcagttgcaagaacagaaaccctgcccccccttaataataaaaaagaaagtttattggaaaaaaaa

SEQ ID NO: 125 - DNA, 2073 bp, Homo Sapiens
ggcgctactgaggccgcggagccggactgcggttggggcgggaagagccggggccgtggctgacatggagcagccctgctgctgaggccgcgccctccccgccctgaggtgggggcccaccaggatgagcaagctgcccagggagctgacccgagacttggagcgcagcctgcctgccgtggcctccctgggctcctcactgtcccacagccagagcctctcctcgcacctccttccgccgcctgagaagcgaagggccatctctgatgtccgccgcaccttctgtctcttcgtcaccttcgacctgctcttcatctccctgctctggatcatcgaactgaataccaacacaggcatccgtaagaacttggagcaggagatcatccagtacaactttaaaacttccttcttcgacatctttgtcctggccttcttccgcttctctggactgctcctaggctatgccgtgctgcggctccggcactggtgggtgattgcggtcacgacgctggtgtccagtgcattcctcattgtcaaggtcatcctctctgagctgctcagcaaaggggcatttggctacctgctccccatcgtctcttttgtcctcgcctggttggagacctggttccttgacttcaaagtcctaccccaggaagctgaagaggagcgatggtatcttgccgcccaggttgctgttgcccgtggacccctgctgttctccggtgctctgtccgagggacagttctattcacccccagaatcctttgcagcgtctgacaatgaatcagatgaagaagttgctgggaagaaaagtttctctgctcaggagcgggagtacatccgccaggggaaggaggccacggcagtggtggaccagatcttggcccaggaagagaactggaagtttgagaagaataatgaatatggggacaccgtgtacaccattgaagttccctttcacggcaagacgtttatcctgaagaccttcctgccctgtcctgcggagctcgtgtaccaggaggtgatcctgcagcccgagaggatggtgctgtggaacaagacagtgactgcctgccagatcctgcagcgagtggaagacaacaccctcatctcctatgacgtgtctgcaggggctgcgggcggcgtggtctccccaagggacttcgtgaatgtccggcgcattgagcggcgcagggaccgatacttgtcatcagggatcgccacctcacacagtgccaagcccccgacgcacaaatatgtccggggagagaatggccctgggggcttcatcgtgctcaagtcggccagtaacccccgtgtttgcacctttgtctggattcttaatacagatctcaagggccgcctgccccggtacctcatccaccagagcctcgcggccaccatgtttgaatttgcctttcacctgcgacagcgcatcagcgagctgggggcccgggcgtgactgtgccccctcccaccctgcgggccagggtcctgtcgccaccacttccagagccagaaagggtgccagttgggctcgcactgcccacatgggacctggccccaggctgtcaccctccaccgagccacgcagtgcctggagttgactgactgagcaggctgtggggtggagcactggactccggggccccactggctggaggaagtggggtctggcctgttgatgtttacatggcgccctgcctcctggaggaccagattgctctgccccaccttgccagggcagggtctgggctgggcacctgacttggctggggaggaccagggccctgggcagggcagggcagcctgtcacccgtgtgaagatgaaggggctcttcatctgcctgcgctctcgtcggtttttttaggattattgaaagagtctgggacccttgttggggagtgggtggcaggtgggggtgggctgctggccatgaatctctgcctctcccaggctgtccccctcctcccagggcctcctgggggacctttgtattaagccaattaaaaacatgaatttaaaaaaaaaaaaaaaaaaaaaaaaaaaaaaaaaaaaaaaaaaaaaaaaaa

SEQ ID NO: 126 - DNA, 3085 bp, Homo Sapiens
gaaatcctgctcccaagtcacagataggctgacgggtcagagggcaagacgtgacccagggccgagagggtgagtgaccaggaaaatcggattcatcagttcacttgtttgtttcagaaacgtgcacaaagacctgctgcatgaggccctcgtcttcagtttctgtttcatgcccagcattaaaccaagtatctcattttgccaatttgacttctgtaggggccatggcacctgcaaggtgtttctcagcaagattgaggaccgtgtttcagggcgtggggcattgggctttgtccacatgggctggcctgaagcccagccggctactgccacagcgggcttctcccaggctgctctcggtcggccgtgcggacctcgccaagcatcaggaactcccggggaagaagctgctctctgagaaaaagctgaaaaggtactttgtggactatcggagagtgcttgtctgtggaggaaacggaggcgctggggcaagctgcttccacagtgagccccgcaaggagtttggaggccctgatggaggggacggaggcaacggtggacacgtcattctgagagttgaccagcaagtcaagtccctgtcgtcggtcctgtcgcggtaccagggtttcagtggagaagatggagggagtaaaaactgcttcgggcgcagtggcgccgtcctctacatccgggtccccgtgggcacgctggtgaaggagggaggcagagttgtggccgacctgtcttgcgtgggagatgagtacattgccgcgctgggcggggcaggagggaaaggcaaccgcttcttcctggccaacaacaaccgtgcccctgtgacctgtacccctggacagccaggacagcagcgagttctccacctggagctcaagacggtggcccacgccggaatggtgggattccccaacgccgggaagtcctcactgctccgggccatttcaaacgccagacccgccgtggcttcctacccgttcaccaccctgaagccccacgtcgggatcgtccactacgaaggccacctacaaatagcagtggccgacatccccggcatcatacgaggcgcccaccagaacaggggtctggggtccgccttcctcaggcacatcgagcgctgccgctttctcttgttcgtggtggatctttctcagcctgagccgtggactcaagttgacgatttaaaatatgaactggagatgtatgaaaagggcctgtctgcgaggccccacgcaatcgtcgcaaacaagattgacctccctgaagcccaagccaatctgtcccagctccgggatcacttgggacaggaggtcatcgtgctgtcggcgttgaccggcgagaacctggagcagctgctgttgcacctgaaggtgctgtatgacgcctacgcggaggccgagctgggccagggccgccagccgctcaggtggtagccacgccagagcggggtcgcctctgggcctctgtctgagcaaacctgggtgtgaattcggtggttttgaatgcataaagtgccttgtggacacgggggagttgtggtgcttctgggtctctgggccccgcctgctggcctgagatgccctcatgttgggaagcattccgtgccccctaccccgcctgccctccgtatttcctgcacctgtcagcctgcaccgactgatgagccagttgctcatttgtgctgattaacacccctaataaggggttggggtgcccataacggggtggccctgccgctgactcaggtctccgccatgcacgcgtggactctcggatgagctcagcagaaccgcacagccagagccccaggtcagaagtgcagaccagggttctcagcacagtgcccgtcgtgcttccatggcttgctacggagagagacctctggatccacactggggctgcgtctggcccgttgtccagcagccctgcggtaccgcaagcccaggcaccagtgtctcggggggcctcactgctgcgcaaggggtggggccgaggatgcaagtccaggcagagcggcgcaggcagctgtgagcttttctccatcagccgtctgagaagagcagtgaggccagctgcttcctgtccttcagaacacttctctgtgctcagtgggagccaggaagcctcaggcttcacgactgaatgcacccaatatccgacctggctgcgtgtttctggctgggctgccgtgtgcacagcaagttaactagaggggctgtgggccatggaactgtcagcgttattctcagaaggcggccgtggcatgggcagggtatagtgaggagtggaaggagacgtgtgcctggtaatatggggcggaatttccactcagctccatttgctggggatttaaagagaacccttgtgctacgccaggcagttaccgagccgaagggagatgatgggccttcgcccctcagtgggatggcagctgagggggccctgcatttgaccgtcgagactgcagcagcgcctttcctgtctgtggtttaagtctttgcagtcaagtactgatgcatccaagccaggcccatgcctggtgtctccctgactgcagaggagccccagggcaaggacagctcagctgctggcagcctgcctggcccatagacatcccccaagtagtctcaggcctctgacatgtccctgaggggcccctaagaaagaaagtggaggggacactccagaggctgtcgtgggaggatcatgtgagcctgggaggtcaaggctgcagtgagccgtgattgcaccactgcactccagcctgagtgacagagcgagaccctgtctcaaaaaacaaacaaacaaacaaacaaaaacagaacattctgggcacggtggctcatgcctgtagtcccagcactttgggaggccgaggctggtggatcacaaggtcaggagattgagaccatcctggctaacacagtgaaaccccgtctctactaaaaatacaaaaaaattagccaggcgtggtggcggtcacctgtagtcccagctactcgggaggctgaagcaggagaatggcgtgaacctgggaggcggagcttgcagtgagccgagatcacaccactgc

SEQ ID NO: 127 - DNA, 1241 bp, Homo Sapiens
agttcactcactttcaaagccagctgaaggaaagaggaagtgctagagagagcccccttcagtgtgcttctgacttttacggacttggcttgttagaaggctgaaagatgatggcaggaatgaaaatccagcttgtatgcatgctactcctggctttcagctcctggagtctgtgctcagattcagaagaggaaatgaaagcattagaagcagatttcttgaccaatatgcatacatcaaagattagtaaagcacatgttccctcttggaagatgactctgctaaatgtttgcagtcttgtaaataatttgaacagcccagctgaggaaacaggagaagttcatgaagaggagcttgttgcaagaaggaaacttcctactgctttagatggctttagcttggaagcaatgttgacaatataccagctccacaaaatctgtcacagcagggcttttcaacactgggagttaatccaggaagatattcttgatactggaaatgacaaaaatggaaaggaagaagtcataaagagaaaaattccttatattctgaaacggcagctgtatgagaataaacccagaagaccctacatactcaaaagagattcttactattactgagagaataaatcatttatttacatgtgattgtgattcatcatcccttaattaaatatcaaattatatttgtgtgaaaatgtgacaaacacacttatctgtctcttctacaattgtggtttattgaatgtgatttttctgcactaatataaattagactaagtgttttcaaataaatctaaatcttcagcatgatgtgttgtgtataattggagtagatattaattaagtcacctgtataatgttttgtaattttgcaaaacatatcttgagttgtttaaacagtcaaaatgtttgatattttataccagcttatgagctcaaagtactacagcaaagcctagcctgcatatcattcacccaaaacaaagtaatagcgcctcttttattattttgactgaatgttttatggaattgaaagaaacatacgttcttttcaagacttcctcatgaatctctcaattataggaaaagttattgtgataaaataggaacagctgaaagattgattaatgaactattgttaattcttcctattttaatgaatgacattgaactgaattttttgtctgttaaatgaacttgatagctaataaaaagacaactagccatcaaaaaaaaaaa

SEQ ID NO: 128 - DNA, 3632 bp, Homo Sapiens
gtagtcttttttttgcagaatgggccaaggggacagagacttcactcgggagccagaacctgttttcaacatgggtattttaagaagagacggagaggctgtcactgcagtggtcactgtcctggaaaagtaaccgttgcacggcccagaagtggctctgtggcggccaatgggagccgaagcctgcgaggatgttgggaattgtagttctggcgtcggtcggtggccgagatcccgggcacgctggctctggtccaccttctccaatccctgcctgctgggagaggacgatctcttgagaaaggaaagacttctgtgctcccgagaacttcctatcaggtcctggctgcagggaaacaagctgggctttttataattaaggttggaagaagtcaccacaggcagcagaactccatcttgagatgaaataacatctacctggacctctggcagaatttcaaggcacacactgggctgactctggcgccatgatgttgccttatccttcagcactgggagatcaatactgggaagagattttgcttccaaagaatggggaaaatgtagagactatgaagaaattgacccaaaatcataaagcgaaaggcttgccttctaatgatactgactgcccccagaaaaaggagggaaaggcccaaatagtggtaccagttacattcagggatgtgactgtgatcttcacagaagcagaatggaagagactgagtccagagcagaggaatctatacaaagaagtgatgctggagaattacaggaatcttctctcattggcagaaccaaagccagaaatctacacttgttcctcctgccttctggccttctcctgtcagcagttcctcagtcaacatgtacttcagatcttcctgggcttatgtgcagaaaatcacttccatccagggaattctagcccagggcattggaaacagcaggggcagcagtattcccatgtaagctgttggtttgaaaatgcagaaggtcaggagagaggaggtggctccaaaccctggtctgcaaggacagaggagagagaaacctcaagggcattccccagcccactccaaagacagtcagcaagtcctagaaaaggcaacatggtggtagaaacagagcccagctcagcccaaagaccaaaccctgtgcagctagacaaaggcttgaaggaattagaaaccttgagatttggagcaatcaactgtagagagtatgaaccggaccataacctggaatcaaactttattacaaacccgaggaccctcttagggaagaagccctacatttgcagtgattgtgggcgaagctttaaagatagatcaaccctcatcagacaccatcgtatacactcgatggagaagccttatgtgtgcagtgagtgcgggcgaggttttagccagaagtccaacctcagcagacaccagagaacacattcagaagagaagccttatttgtgcagggagtgtgggcaaagctttagaagtaagtccatcctcaatagacatcagtggactcactcagaggagaagccctatgtttgcagcgagtgtgggcgaggctttagcgagaagtcatccttcatcagacaccagaggacacactccggtgagaaaccctatgtgtgcctggagtgtggacgaagcttttgtgataagtcaaccctcagaaaacaccagaggatacactcaggggagaagccttatgtttgcagggagtgtgggcgaggctttagccagaactcagatctcatcaaacaccagaggacacacttggatgagaagccttatgtttgcagggagtgtgggcgaggcttttgtgacaagtcaaccctcatcatacacgagcggacgcactctggagagaagccttatgtgtgtggtgagtgtggccgaggctttagtcggaaatcactcctccttgtccaccagaggacacactcaggggagaagcattatgtctgcagggagtgtaggcgaggttttagccagaagtcaaatctcatcagacaccagaggacgcactcaaatgagaagccttatatttgcagggaatgtgggcgaggcttttgtgacaagtcaaccctcattgtacatgagaggacacactcaggagagaagccttacgtgtgcagtgagtgtggccgaggctttagccggaaatcactcctccttgtccaccagaggacacactcaggggagaagcattatgtttgtagggagtgtgggcgaggctttagtcataagtcaaatctcatcagacaccagaggacacactgacgggagaaacctgtgtatgcaggggtcatgaacaagacctgagtgaccagtcaagcctcatgttaccccagagagacacatggggagtagaccctgtgtacacagattgtgagtgaagttccagagatgtgtcagcccttatcaggcatgggagggacacgttcaggagaggagccttatgagtatagagtacgggcaactgtagccatcagtcagccttgagcatgcacaaaaggacacacttaggagagaagtttatgtgtagggactgtgggaaggctttagcaataatcaacatttaccagacatccaatgacagcctcaggggaaagcacccttgtctggggagtgttggggagcatcagtaaaagaatggacactcaggcacagagtggccctcaggaaggaggtctttgtttgtaggatgtatgggcaaagcttttgtgatcacacaccacagggagaatctgcatgtggggacactgtggagctctgcccagatgaccttttcaggggtaacaccccagctgcttgagagaacagtgttgctgctggcagagatgcattccagagatgcactccgctctggaactcactctcagccacagggagctgcatgcaccacaggggcaatgcacctttgcaggggtaccttctggccccaacccttgactcaacggggacaactccagaaggtcattccagatccagagatccccatcgaactgaaggatcactgggttgcagacacattgcaggtcagcttcttcctctgcccagtcctgccctcactccccagtgaatcctcaattttctgtctcgttgtctgtccagataattgattctaagacatgttaggtatataaggagtgtagataaggcttcagccatgagtcaccccccagtaagccccagagtatattgaatagaaattctgcatgtgtggggagaatggacaaggacttaggaaaaagtcctcatcaaagaacagcttttttgggacaagctttacatgggtggggagggaaaatgtgaaacacattagcaataagttaaacctcatcttgtactaaaggaggacacactcagggagaagacctctgtgggcagggcttgtgggtggagcttcatcccgatgtcactcctcaactgacttaggaggacagtcttgctaccccaagtcactacctcactcacctctgagggattttcaggaaatgtcttgactcccccatgtactctgtatgtgagcgaagatggcagtaactgttaaataagcattcttttctacttcttggaatcagatgaaataaaaaagcaggctttatttaagtaatcaaaaaa

SEQ ID NO: 129 - DNA, 3702 bp, Homo Sapiens
agcgggcctcagcgccggctcccggccgggccgcggccgccgaccgttgagccgccggctgagccgcctgctgaagtccctccctcaggaacccctccgccaccctccacctccgaaccgctctcgcggcggcgacccatgtgggggttcaggctcctgcggtcgccgccgttgctgctcctgctgccgcagctcggaatcggaaacgcctcgtcctgctctcaggccagaaccatgaacccgggcggcagcggcggcgcgcgatgctccctctcggccgaggtgcgccgccgtcagtgcctgcagctttccaccgtgcctggagccgatccgcagcgcagcaacgaattgctcctgttggcggcggccggggagggactggagcggcaggacctccccggggacccagcgaaggaggagccgcagccgccgccccagcatcacgtcctctatttccctggggatgtgcagaattaccatgaaattatgactcgtcatcctgagaattatcaatgggaaaactggagtctagaaaatgttgctaccattttagcccaccggttccccaatagttatatttgggtgataaaatgttcccgaatgcatttgcacaaattcagctgctatgacaattttgtgaaaagtaacatgtttggtgccccagaacacaatactgactttggagcttttaagcacctttatatgttattagttaatgcttttaatttaagtcagaatagtttatcaaagaaaagtttgaatgtttggaataaggactccatagcatctaactgtagatccagtccttctcatactacgaatggttgccagggagaaaaagtgaggacctgtgaaaaatctgatgagtctgccatgagtttttatccaccatcactaaatgacgcatcttttactttgattggattcagtaaaggttgtgttgttttgaatcagttgctttttgaattgaaagaagccaagaaagacaagaacatagatgcttttatcaaaagcataagaacaatgtattggctggatggtggtcattctggaggaagcaatacttgggttacttatccagaagtcttgaaagaatttgcacaaacaggaattatcgttcacactcatgtaacaccttaccaagtacgtgatccaatgagatcttggattggaaaggagcacaagaaatttgttcagatacttggggatcttggtatgcaggtgactagccaaattcattttacaaaggaagctccttccatagagaatcacttcagggttcatgaagtattttgagattacaggtatattaatgaacttgttcagtggaagaacataagcacttttgagtgttataaattcagataatgggatgtaattcatagctgcattgtcagttttggggtatggggggaagcacacattcctaaaatgtgagtgtaatgtgcaatagtattttttgcttgtgaatgtgagcagttattaatttggattgagttagaattagttaatttgaaatctaacaaggtggtttgtaataatgctgaggagatataagacccttaaaatgaaagttacaacattgttcttataaaaggtaactaaaattgttactgttggaaataactgattttctgagtaatgttttaaactaatttggtgacattttaacagtaattagctattttgagtggaaatattttcatttctcttcaaacaaaagcaaaggtacgatgctgttttctatcattttggaataactgcaccctgccttttgtgtttttgtaaactccttgactcattctttcatgtgtcaccaagtacttttctcatgagagtcaacatatatttgtttccaaatgtccacaagtgtacaatagtgtaaaggtggtttttaaaaacatagccaggtgtggtggcacgtgcctttagttccagctactcaggaggctaaggcaggaggattgcttgagcccaggctgtgtggttcaccataattgtgtttgtgactagctactgcactccaacctgggcaacatagtgggacttcatctctaaaacaaaacaaaacaaaattacacttaagcactattgtttaatttttaattgtcagtttatcattattttgggtaagacattctggggtttcttgaatcttgtccaaaaaccagttgttttggaaaattgctttaaattgagcatatttatgtatattggataaaaatgtactacagagcaaatttcaaatttttcattatatcagtctttttgaaaggatcaacttggataaaataaatatataatgctctatttgttagagctctattaaaaaggaaacagattccatagatctaagtcaatgtttctccagaagcatgattttgtctgccaaaagaaaatagctctctttggccaaaatgcaaaattacattgctataagaaaagttacaagggaaagtttgaagacacaaatgatttaattttggctcaaaaactgaatttgcttaacactgctacataatttgggtgaagtttccttctgcccgtttttcttgacctagataaatacactttgagaaatccagatctaataaatgtcaaccaacattgacattgtaattgggtgattacaataaaaggtgagcagtttgttgtttattaataattagcttttgcaggtaatgaaatagcagggaagtaacatgctgctttaggactaaaaaaaaaaaaaaaaaaaaaaaagacactgaagcttaataccttaatgacccagaagacctagatttataaagccatatagaataaaaatgttaatttcttggtttcttcccagaattatattttaatgactccataaatacattccaaatattcagagattcatgagaaaggattcttaacaaatgtttaaaaataacatttctttttggtgttttaacacttaattttataaactgcagaacagcatctctaaatggcttttttttttttttttaaagacaaagtagtattatgttgcttcagtttctttaaatacctcgtttcttttgagaccaaaaattcccatcaaggaaataaatcagcctgattttaacattttacatattacattgcctttaagcactatgattggatggctttttttctatttgtttaataatccttggctaaattcacatgtatctaaagtaaaatagctgagttactgaattctataaggggaagaaaaagcatttattttcacatgattaactgaaatggaaaagtaagacatttagcagaataattcatttaaaaataattttaaaaaatcagacatatttaaaaatctaggttgtctatccagtatgtgaatgcttaattataattgttacatgttgaatgggtattaagagtaagtcaccaggtacacaaaactgccatcatagcaaaatgagacagtgttgaaaagacaaaatattttctggaatgaaaatatattcaagttgatccatattcagatgttttctgtttaatacttcagattggtcctttgtccacatttgtttaaaacttattgtaatgttaatttatacttttggattgtgcctttgtcatgagttgagaaaagtagtcctacaaataatgtgaaagttgttaccaccacagcatgaatgtataattgtattaaaattgatcatccacagaaaaaaaaaaaaaaaa

SEQ ID NO: 130 - DNA, 2395 bp, Homo Sapiens
gccgccgtcggcgcgctgggtgcgggaagggggctctggatttcggtccctcccctttttcctctgagtctcggaacgctccagctctcagaccctcttcctcccaggtaaaggccgggagaggagggcgcatctcttttccaggcaccccaccatgggcaatgcctccaatgactcccagtctgaggactgcgagacgcgacagtggcttcccccaggcgaaagcccagccatcagctccgtcatgttctcggccggggtgctggggaacctcatagcactggcgctgctggcgcgccgctggcggggggacgtggggtgcagcgccggccgcaggagctccctctccttgttccacgtgctggtgaccgagctggtgttcaccgacctgctcgggacctgcctcatcagcccagtggtactggcttcgtacgcgcggaaccagaccctggtggcactggcgcccgagagccgcgcgtgcacctacttcgctttcgccatgaccttcttcagcctggccacgatgctcatgctcttcgccatggccctggagcgctacctctcgatcgggcacccctacttctaccagcgccgcgtctcgcgctccgggggcctggccgtgctgcctgtcatctatgcagtctccctgctcttctgctcgctgccgctgctggactatgggcagtacgtccagtactgccccgggacctggtgcttcatccggcacgggcggaccgcttacctgcagctgtacgccaccctgctgctgcttctcattgtctcggtgctcgcctgcaacttcagtgtcattctcaacctcatccgcatgcaccgccgaagccggagaagccgctgcggaccttccctgggcagtggccggggcggccccggggcccgcaggagaggggaaagggtgtccatggcggaggagacggaccacctcattctcctggctatcatgaccatcaccttcgccgtctgctccttgcctttcacgatttttgcatatatgaatgaaacctcttcccgaaaggaaaaatgggacctccaagctcttaggtttttatcaattaattcaataattgacccttgggtctttgccatccttaggcctcctgttctgagactaatgcgttcagtcctctgttgtcggatttcattaagaacacaagatgcaacacaaacttcctgttctacacagtcagatgccagtaaacaggctgacctttgaggtcagtagtttaaaagttcttagttatatagcatctggaagatcattttgaaattgttccttggagaaatgaaaacagtgtgtaaacaaaatgaagctgccctaataaaaaggagtatacaaacatttaagctgtggtcaaggctacagatgtgctgacaaggcacttcatgtaaagtgtcagaaggagctacaaaacctaccctcagtgagcatggtacttggcctttggaggaacaatcggctgcattgaagatccagctgcctattgatttaagctttcctgttgaatgacaaagtatgtggttttgtaatttgtttgaaaccccaaacagtgactgtactttctattttaatcttgctactaccgttatacacatatagtgtacagccagaccagattaaacttcatatgtaatctctaggaagtcaatatgtggaagcaaccaagcctgctgtcttgtgatcacttagcgaaccctttatttgaacaatgaagttgaaaatcataggcaccttttactgtgatgtttgtgtatgtgggagtactctcatcactacagtattactcttacaagagtggactcagtgggttaacatcagttttgtttactcatcctccaggaactgcaggtcaagttgtcaggttatttattttataatgtccatatgctaatagtgatcaagaagactttaggaatggttctctcaacaagaaataatagaaatgtctcaaggcagttaattctcattaatactcttattatcctatttctgggggaggatgtacgtggccatgtatgaagccaaatattaggcttaaaaactgaaaaatctggttcattcttcagatatactggaacccttttaaagttgatattggggccatgagtaaaatagattttataagatgactgtgttgtaccaaaattcatctgtctatattttatttagggaacatggtttgactcatcttatatgggaaaccatgtagcagtgagtcatatcttaatatatttctaaatgtttggcatgtaaatgtaaactcagcatcaaaatatttcagtgaatttgcactgtttaatcatagttactgtgtaaactcatctgaaatgttacaaaaataaactataaaacaaaaatttgaaaaaaaaaaaaaaaaaa

SEQ ID NO: 131 - DNA, 3580 bp, Homo Sapiens
gccccagcagccccagccccagccccaggcccagcagcagcagcagcagcccctgctctcccgccgcccggagaggctctgcagccatgaagccaaccgtcccgaggcaccgccggtaagcagggagcctccgcggagctcccgccgccgctcccccttggtgagtcctgccgcagcgagaggcatggagaaggccgcccccgcggggcgctgatcccctcgccgcgcccgcgcgcacacgccccccgccgccgccgccgctgccgccgccgcgcgcccccagtacctcgctccccacccaggccccaccatgaccggctccgcggccgacactcaccgctgcccccaccccaaaggcgccaaaggcacccggtcccggagcagccacgcgcggcccgtgagcctcgccaccagcgggggctcagaggaggaggacaaagacggcggggtgctgttccacgtcaacaagagcggcttccccatcgacagccacacctgggagcgcatgtggatgcacgtggccaaggtgcaccctaaggggggagaaatggtgggcgccatcaggaacgccgccttcttggcaaagccttcaataccccaggtcccaaactacaggctgtcgatgacgatcccagactggctccaggcgatccagaattacatgaagaccctacactacttaaccaatgggcagccttccattgagcggttccccatcagctttaaaacctacttctcaggaaactactttcaccacgttgtgctggggatttactgcaatggccgctatggctcattgggcatgagccgcagggctgagctgatggacaagccattgacttttcggactctgagtgacctcatctttgactttgaggactcttacaagaaatacctgcacacagtcaagaaggtcaagattgggctgtacgtcccccatgagcctcatagcttccagcccattgagtggaagcagctggtcctcaacgtctcaaagatgctgagggctgacataaggaaggagctggagaaatatgccagggacatgagaatgaagatcctgaaacctgcaagtgcccactctccgacccaagtgagaagccggggaaaatccctgtcccccagaaggagacaggcaagccccccgaggaggctcggccggcgagagaagtcgcctgcactgcctgaaaagaaggtggctgatctgagcactctgaatgaagtgggctatcaaatccgaatttagccaagccataccggccagcaagagggtttctgtggtgcttctctctgcactttacccagcatcttcaggaggaactgcaactatttattaagaacttgtgaattttatttttaaggattcacctggaaatagaatctgagtgggtggtaaccattagctttaaaaaattcactaaaaggcaccatgaaaaggctgaagtaataagccccactggggttgaactatgtccctcactcaagatcttaaggataaccgtaactgaagttttatatttttccatttacctactttcttttacttgctttgaacattatgcctcaccaatagtaaatgttcatgaaataatctcttgaacttttggtatagtaaggtaactctaacagtattactgtctttttcagcaataacagaaagcaaaaatgggtgggttttttttaagcagttattacctcagcattttgacatcagatatgcaaacttaatggcgttttgtttttttatattctatttgtattctttccccagtatttcccatggggatctccacaagtttggagttttttcctggtgcacacacgtgaggagatttaaggtactatatgcaagtgttttactaaaaagcactgaaattcttctggcaatacaagaaccattttcaggatcttggagttacttccttcttaatctttcttaaagcattcactgatgtttttgttttttcaaaatgaaacaaaaatatcacattgagaagctagtctatgttctgtcactaacatttaaactttgcagactctaacaaaaagcacaagaggtcacgtactattatacaaatttagcggtactggatttacctctgacattaacacactcaggcagagaccaggagtgatcagcaggtcttcagaaccaaaaaacctttctgttcacatttcatctgatttttaaactgaggcaggctttgattcttctgaaggatgccaagaatcaaactaagggaggactcactgttaaagatgtgttctgatgtcttatattaagaccaaatgtgacatgatgtgattatcttccagtactttgcttttaggtaccatttcatgacattttaggaatgagtattggaaaatataaagaattagaaaagcagcactttttttttaatggaaaagtcttcggtccagtgttacaccttatagtgtaattcagtccctaagcacagaatgaatgtctggcctgcatatggtagttacagtgtaacctctggctgcagaccacacaggacaaccctaacagcctagtcttgtatggtgtaaatatcaagagtacagcttcaatttcatttgctttatcttagcaacaatgccaactcaggagagcagacggccgatttcagtgaagtctggtagtcaacagatgttatttcagtctcagtgcatctcctctggctttctttgactgaaggtgtttataggaaggaagttaaaaaaaaaaaagctcattgagattctttaccaattctttacaagatttctgggggtgacagggaaagcaaaaggacttcaaagcaaaagggtgcacaagagcttacttcaccctgaaaatcagtattattaatgaaaagtactgttttcttaaagaagtcgaatgtcctttagatgaacaagaccaagtatacatctccattagattaaaatgtagcacagggttaaaaattatcagtttaatctctttaagaacagtattatcagagtttaaaatgagttagctctgtttatctacacacagcaaacccattcgcagcctcttggccacatgtattcagatgtttgaaatagtgaatcatttcattttcattctaaaacaatactgacttagccatataccttctgtttgtcaatctgaaacttgcttacatctaataagtagacctcttataacactgcaaccattctaagagttggaatttatttttgccaagtattaagtactgttacatctaaaatacagaatgtcaaatggttgcatagcttgtttcccacaacaaggaggaaaagaacaggaatacaaactctgtaatatgctgataaagaagccttagaactgccaactggcttgatggttcaattagtaagctaatttctcccacacccgctccttgatttttagactaattttcccaaagcaaggtttagtcacacaaacttgaaagtacatttaaaatgttcttagttgtcatcctacttttattgcctatggaatatgctaatttctaaaaaaaatacgggagaggcaccaaacccctaaattctagtgcaataatttaaaaaaaaaaaaaaa

SEQ ID NO: 132 - DNA, 4701 bp, Homo Sapiens
ggcgaggccggcggctgccgggcctccaatctcggcggcggcggcggcaacaggggagcctgggtctcgcggcctgcgagtccgtcgcgtgctgagggagacgcaggaggtggagccggccgggtgctcgagggaaggagactggaagctggttccggcgtgaggagagtctgaaaaaggggagcgcggagaggaggctggaagaggaagatgcctagcacagaccttctgatgttgaaggcctttgagccctacttagagattttggaagtatactccacaaaagccaagaattatgtaaatggacattgcaccaagtatgagccctggcagctaattgcatggagtgtcgtgtggaccctgctgatagtctggggatatgagtttgtcttccagccagagagtttatggtcaaggtttaaaaagaaatgttttaagctcaccaggaagatgcccattattggtcgtaagattcaagacaagttgaacaagaccaaggatgatattagcaagaacatgtcattcctgaaagtggacaaagagtatgtgaaagctttaccctcccagggtctgagctcatctgctgttttggagaaacttaaggagtacagctctatggacgccttctggcaagaggggagagcctctggaacagtgtacagtggggaggagaagctcactgagctccttgtgaaggcttatggagattttgcatggagtaaccccctgcatccagatatcttcccaggactacgcaagatagaggcagaaattgtgaggatagcttgttccctgttcaatgggggaccagattcgtgtggatgtgtgacttctgggggaacagaaagcatactgatggcctgcaaagcatatcgggatctggcctttgagaaggggatcaaaactccagaaattgtggctccccaaagtgcccatgctgcatttaacaaagcagccagttactttgggatgaagattgtgcgggtcccattgacgaagatgatggaggtggatgtgcgggcaatgagaagagctatctccaggaacactgccatgctcgtctgttctaccccacagtttcctcatggtgtaatagatcctgtccctgaagtggccaagctggctgtcaaatacaaaataccccttcatgtcgacgcttgtctgggaggcttcctcatcgtctttatggagaaagcaggatacccactggagcacccatttgatttccgggtgaaaggtgtaaccagcatttcagctgacacccataagtatggctatgccccaaaaggctcatcattggtgttgtatagtgacaagaagtacaggaactatcagttcttcgtcgatacagattggcagggtggcatctatgcttccccaaccatcgcaggctcacggcctggtggcattagcgcagcctgttgggctgccttgatgcacttcggtgagaacggctatgttgaagctaccaaacagatcatcaaaactgctcgcttcctcaagtcagaactggaaaatatcaaaggcatctttgtttttgggaatccccaattgtcagtcattgctctgggatcccgtgattttgacatctaccgactatcaaacctgatgactgctaaggggtggaacttgaaccagttgcagttcccacccagtattcatttctgcatcacattactacacgcccggaaacgagtagctatacaattcctaaaggacattcgagaatctgtcactcaaatcatgaagaatcctaaagcgaagaccacaggaatgggtgccatctatggcatggcccagacaactgttgacaggaatatggttgcagaattgtcctcagtcttcttggacagcttgtacagcaccgacactgtcacccagggcagccagatgaatggttctccaaaaccccactgaacttggaccctttctagtctcaaggggattccagccttcagaaggttcttgggatatggaacaggccgtgcacaactttgacatctggtcttgctccatagagcacaactcaagatagaccatgagacagcttgagcctcaggattcttgttcttcctcttatcttccttttgtggtttttaatttgaagaccccagagaattccattacataatgattttgcccttgttataaatgttaccctaggaattgttttaaccatttccttttctaaactctctagctttcaactttacttaaacattgtgtggtagctctgacctgtcctgattctttagagaagctggggtacagtttatgagatagctagagcttctttgttatctcaggcaggaggcgtttacataacagatgtttcctcagctgggtgtgaggtatactctaagcaggaggctttttcagccttctctctcttttttttttttttttttttttgagatggaattttgctcttttgcccagtctggagtgcagtggcatgatctcagctcactgcaacctccacccactgggttcaagcgattcttctgcctcagcctcccgagtagctgggattaccggcacccaccaccacgcctggctaatttttcaattttctttttcagtagagacgggttcaccgtgttggccaggctggtcttgaactcctgacctcaggtgatacccgcccccccgcctcagcctcccaaagtgctgggattacaggcgtgagccaccgtgcctggccctgtctctcttaagagtaggttcattgtctgtcttagagtcacttctattgcaactcattttctttttccagggcacagatcgaccaagctgccgttccctattctgcaggacaggactattctagcatacctgcttcgtccacccaggcagggtttggggtggtctcttctgtgcctgcagtccccatttgacacttggttgccaccatctttggagattattgtttggaatgatgcttccattggctttttcttgttaccatggactaggaagaaaacatggtttccaaataatctgggagcttttggccatggtgccgccttcctgaattggcagtggtcagagcacacctgaaccctatcctgggctggtgatgagcagaaatcagacctttttctatgcttttttgaatatcagagtaggatgaacacccagattcaaatatgtcaccaaagttggtggtggtccttccctgcacccttgcgttaagccattatgtaatgaaaatgtgtttgcttgaaggaacagctcaaagcaccttcacaagttgccttgacttaccctaggtgggtgtgaaagagcacccgtagcaaggaaaattttctctattagtgtgttcttctgcctcttcccccttgattcagctttcagaggtactatggcagttttgcctcaggtgctgaacatttctcagccctggctaaaagggagcagcacagggagagaaacaggataggaaagcagaatggcgagcagcctatggcccagggcctgtaatcccttcccaagactagctgctcagggtggtgcagggacaggaccagaccctgcgcctatttcctgccttctttcccctatagggaactctgtaggctgagccactgtcctgctcttatgacattatatcttgtgcctttctcctcagcagtgagcagtgagctactcctggcccaggccctaggggaaatggatcagtctttgaggtttctatttggggaggggagtacttaagatgagtcaaaagacactttcctctgttccattccccatctcagggactcctgaatattcagcctctccaggctggtgtcttctagtttcccccactgggaatgctggctgggagagccatgactaccagacttttcctcaggctccttggcatgttagtctgaattgttcttgagcactgtactactgacccaacaactgtgactagctggccacgccattcagggctggtgtggcatttatgtgtgtgtgtgtgtgtgtgtgtttttcctgtttgcccagcagtgcattgtgggttccaagagtgggtagtgtgtgtatgtgtgtgtgtcagagggagacctggcaggcacctctttgagagtagctgtggtcagagctgtttggtcagtgcattatgttgaatgaggtccaggaacccagagccacccagcagacaccactgtggcttgccagctgccaagatggagaagcatgtgcccctgtagagcgtctccccagaaccagaccccgagccactcgcttcctctgtgctgtgacaacattggtgccaggggagatggtgtttttcaaagggacctactgtagccactttaatttacaattaagagccttagtttgacttaacacttttgtaggcttttcattgtgtatttttgtgtatgtgtgcatatagcagctactctgtagcagaggtgggtagagacacttaatagtatcatgtcgcatgcagatgtcacatcggcctctgcaaaaactgtactgtcttgtttctgcattagacttaagtagtcatgtgaatatactgctatgtcacttttaatattacgagttttatacttggaaaatggtacttgcttcttttaaatctctgtcttctctaacctcccccttcccatttcaatgctcccttcctaatttcagcaataatctcaaaaagcaattaaatagttaaatgaccctaattgtaaaaaaaaaaaaaaa

SEQ ID NO: 133 - DNA, 2171 bp, Homo Sapiens
gttagagaagggggacacaaatgtcttcaggcttaggtccctgggggctcccagtcctgcccctgttcctctactcacatcccagctcctcccagtttcttttcggacctcctcctctccccttccttctctattccaggctgggttgggctctaagcaaggggagggattagagcctccttcctctctgcccctccccatgggtctctagggggctggtgcaggcagcagcagaggcactctgggcagctgggtgagggcccatctgggcaaggcccccagcgcctgccttctctcccggggccctgtgggcaagcctcctgcttcactttcaggtttctcgaagtgccttcttgctcctgtctgtttccccatcctgccagatttctgtttctcttgctgggcttttggcagtagggggctgtgttggtgggccctacgaagatgctcagtgctcgagatcgccgggaccggcaccctgaggagggggtagttgcagagctccagggcttcgcggtggacaaggccttcctcacctcccacaagggcatcctgctggaaaccgagctggtaacagctgcctcccaacctggtgcctccatctccctgacccccggctcctggccagccttatgccagcccccagctcacccttcagtagcctccttccccaagccctctggacacctctcctgcccgcagctgccccttcttcgtctcctactctgccttcttgctgcctctccacccggagacatttacagcaggtttcagttgcagcaggaaggactgcagttagacagggtgactttttgggacattgaggaagcttgagacatagggatgggacaggggcaatgacagcctctaacatggccacttctcagcacgtccaagaagtctaactatcaaaaagggcagacttcctgcaactgcactttatctgtggtctgctgcccagaaacatctcttctcaggaaaggatcttcccctggttacttagcaagaccacagtgtagagttaaggcctctgcacgtatgccaccctaggtcatcagagctaaaggggctcccagaaaccactgggcagcatctgccttctctcttggcatggaatcaaaggctctggtccttgtcagggggctttcaggcatctgggggtggggaaagcattatgaggcagggggctcctcttggtccctgtggagtcgggtctctgtgggcacaactccaggggctggcattcacactgtacctatgaattactgtgggatagtgctcctgggagccatatggcttggccagactgctggggttgctgggtgagcagagtgggaggccggagactgcccttgaccggcaaatgccctgcaacggtggctcctgacaccaggggatagggagatgtgccagagtccttcctcccctccaaggacaggtagtaggtgccagcctaggggagcttccaaggaggggaaggcaaagccctggcccctgcctgtgtccccttcttggcatgttccacatgctcggtcctgcaggccctgaccctcatcatcttcatctgcttcacggcctccatctctgcctacatggccgcggcgctactggagttcttcatcacacttgccttcctcttcctctatgccacccagtactaccagcgcttcgaccgaattaactggccctgtctggacttcctgcgctgtgtcagtgccatcatcatcttcctggtggtctcctttgcagctgtgacctcccgggacggagctgccattgctgcttttgtttttggcatcatcctggtttccatctttgcctatgatgccttcaagatctaccggactgagatggcacccggggccagccagggggaccagcagtgactctggggctacctggctcctaggcccagccagccagagaggacagtggagcccagacacgtctccttgggattcactagcccccagcccgccaaaccccaccccagccctacacagcagtctggcctgagacgtcactggggacttatctgtggagcctggtgctccaggatgtggcttctcatgaagctctggccagaggaggggaacttattgggggagggggggtggaggggaggaatctggacctctaagtcattcccaaattaaaatattcaaattcta

SEQ ID NO: 134 - DNA, 3220 bp, Homo Sapiens
actgaagagtcatggtggggcccgggcctaccgctgctgccgctgtcgaagagcggcagagaaagcttcaggagtaccttgcagccaagggaaaactgaagagccaaaacaccaagccttatctaaaatccaagaataattgccagaatcaaccaccttctaaatctactattagacccaaaaatgatgttaccaaccatgttgttttgcctgtcaaacctaaaaggtccatcagcattaaactccagcccagaccacctaatactgcagggtcccagaagccgaagttggagccaccaaaacttctgggcaaaaggctgacttcagaatgtgtttcttctaacccatactctaagccttctagcaagagttttcaacagtgtgaagctggatcgtccacaacaggagaactgtcaagaaaacctgtggggtcacttaatatagagcaattgaaaactacaaagcagcagttaacagatcaaggaaatggtaaatgtatagactttatgaataatatccatgttgaaaacgaatctttggataactttctaaaagaaacaaacaaagagaacttgctcgatatcttaacagaacctgagaggaagccagatcctaaattatataccagaagtaagccaaagactgactcttataatcaaaccaagaacagtttagttcctaaacaagccttgggcaaaagttcagttaatagtgctgttctgaaagatagggttaataaacaatttgttggagaaacacaaagcaggactttcccagtaaaatcacagcaactctctagaggagcagatcttgcaagaccaggagtaaaaccctcaaggacggttccctctcactttattcggacccttagtaaagttcagtcatcaaagaaaccagtagtcaagaacatcaaagatataaaggttaataggagtcaatatgaaagaccaaatgaaactaagatacggtcataccctgttactgaacagagagtgaagcacaccaaacccagaacataccccagtttgcttcagggtgaatataacaacagacatccaaacatcaagcaagatcagaagtccagccaagtttgtatacctcagacatcatgtgtactgcaaaagtcaaaagccgtaagccagaggcctaatttgacagttggcagatttaattcagccattccaagcacccctagcataagaccaaatggaaccagtggtaataaacataacaataatggctttcagcaaaaagcacagactttggactccaagttgaaaaaggctgttccccagaaccattttctgaacaagacagctcccaaaactcaagctgatgtcacaaccgtaaatgggacccaaacaaacccaaatattaaaaagaaggcaacagcagaggatcgaaggaaacaactagaagaatggcagaaatctaagggaaaaacctataaacggcctcctatggaacttaaaacaaaaagaaaagtaataaaggaaatgaatatttcattctggaagagcattgaaaaagaagaggaagaaaagaaagcacaactcgaactgtccagtaaaattaacaacactctgacagaatgtctgaacctcatcgaagggggtgtaccttctaatgaaatacttaacatattgtccagcattcctgaagctgaaaaatttgctaaattctggatctgcaaagcaaagttgttggcaagtaaaggcacctttgatgttattgggctatatgaagaggccattaaaaatggggcaacaccaatacaagagttgcggaaagttgttcttaatatcttgcaagactcaaacagaaccacagaagggattacttctgactctttagttgctgaaactagtataacatcagtggaagagctggccaagaagatggaatctgtgaagtcttgtctttctccaaaagagagggaacaagtcacggcgacaccccgaatagccaaggcagaacagcataattatcctggtatcaaattacagattggtccaatccctagaataaatgggatgccggaagtgcaagacatgaaatttatcactcctgtacggcgttcgtcgaggattgagcgagcagtgtcccgctacccagaaatgctgcaggaacacgatttagtagtggcttctcttgatgaactgttagaagtggaagaaacaaaatgttttatattccgtagaaatgaggcgctgcctgtaacattggggtttcaaacccctgaatcataatttcttgatgctttttttaaaaaaggtgtttcagaaccaacataagacaagaaatattcttgtccaagtgacctggaaaaaaagagaggcatcatggatgcagattatggacgctcaggacttaagtaattcactgggcttactctcaaattttctctccccatggaaaatctttgctttatgtgtttaagaccagtttgccagttttacagtatacataaatttcaaacttttgaatatttaccctacaactatgataaatatttatactttattgatctactttaatcccaacatagttttttatatcagaaggttggtcccacaatataatgggacttttctttctgcatccaccttagcagagggcaagttctttcatcgtggaagatctgaactttgacgctagcttgacaggctgaatggaccttgacagatggccaagtcaaaacccctcattttacagatgagtttatgctagctgtgcctttgctcagagatcataaatttatgtgtgatctttgactttcatcacagtatccttgtaaatgagagagaattcttgttttttctatgccaggtctcctcagatgaaacacaatcctgaattggcgtggtcgtctagcttttatattcaaacctagttttgcatttgttactcagaaacacttcaagtaacaaaaggggggcaggggagaggggtggggagtggacacttgcttcttcagttctttgctcagctagggtatagctggcctgagaaggcagtgcaagccccagagactgttgtaggttgctttttcttcctcctgggcaactatttgtggaaaggttttaccttagtcattatgtaaatataattgtgtagaaaaacctagtcaacacattttaaattttagctttcttaatatttaagtattatcttaaaacaacattaaatttctattagttcccgaaaaaaaaaaaaaaaa

SEQ ID NO: 135 - DNA, 1913 bp, Homo Sapiens
gtctgcgcctgcgcgcaagagaggcggggccagcgctcggcatggcggagccagatctggagtgcgagcagatccgtctgaagtgtattcgtaaggagggcttcttcacggtgcctccggaacacagggtgagccaccgcccccagcctggcctggcatttctttgagttcaggaagtgtgacaaggatttggacacccagaaataagcgtgtcgagaagagcacaagcagaggatctgggacgatgccggagtgtgaaggagtttgagaagctgaaccgcattggagagggtacctacggcattgtgtatcgggcccgggacacccagacagatgagattgtcgcactgaagaaggtgcggatggacaaggagaaggatggcatccccatcagcagcttgcgggagatcacgctgctgctccgcctgcgtcatccgaacatcgtggagctgaaggaggtggttgtggggaaccacctggagagcatcttcctggtgatgggttactgtgagcaggacctggccagcctcctggagaatatgccaacacccttctcggaggctcaggtcaagtgcatcgtgctgcaggtgctccggggcctccagtatctgcacaggaacttcattatccacagggacctgaaggtttccaacttgctcatgaccgacaagggttgtgtgaagacagcggatttcggcctggcccgggcctatggtgtcccagtaaagccaatgacccccaaggtggtcactctctggtaccgagcccctgaactgctgttgggaaccaccacgcagaccaccagcatcgacatgtgggctgtgggctgcatactggccgagctgctggcgcacaggcctcttctccccggcacttccgagatccaccagatcgacttgatcgtgcagctgctgggcacgcccagtgagaacatctggccgggcttttccaagctgccactggtcggccagtacagcctccggaagcagccctacaacaacctgaagcacaagttcccatggctgtcggaggccgggctgcgcctgctgcacttcctgttcatgtacgaccctaagaaaagggcgacggccggggactgcctggagagctcctatttcaaggagaagcccctaccctgtgagccggagctcatgccgacctttccccaccaccgcaacaagcgggccgccccagccacctccgagggccagagcaagcgctgtaaaccctgacggtgggcctggcacacgcctgtattcccacaccaggtcttccgatcagtggtgtctgtgaagggtgccgcgagccaggctgaccaggcgcccgggatccagctcatccccttggctgggaacatcctccactgacttcctcccactgtctgccctgaacccactgctgcccccagaaaaaggccgggtgacaccggggggctcccagcccgtgcaccctggaagggcaggtctggcggctccatccgtggctgcaggggtctcatgtggtcctcctcgctatgttggaaatgtgcaaccactgcttcttgggaggagtggtgggtgcagtccccccgctgtctttgagttgtggtggacgctggcctgggatgagagggcccagaagaccttcgtatcccctctcagtcgcccggggctgtcccgtgcatgggttggctgtggggaccccaggtgggcctggcaggactccagatgaggacaagagggacaaggtatggggtgggagccacaattgaggataccccgagactaccaggagagccctgggctggaggctgagctgcatccctgctccccacatggaggacccaacaggaggccgtggctctgatgctgagcgaagctataggctcttgttggataaaagcttttttaacagaaaaaaaaaaaaaaaaaaaa

SEQ ID NO: 136 - DNA, 3131 bp, Homo Sapiens
agtgtttatcagaacttagccagggccagccaagcaggcacagatgctctgctatgaaatgccacgcaggcagagactgacaagcggtaggaactgagctttccccttggactgctgcttcctgctgtgttcaggggagggggtcactttctggcaactctgctgctgctgctgctgctgctgctacttcagcttcctctccactcaaggtaagcaggctaagggagggcaggctgctagggaaagctttgtaccatgaacaggatccgaaagtttttccgaggaagtgggcgagtcttggcatttatctttgtagcttctgtcatctggctcctctttgacatggcagctctccgcctctcattcagtgagatcaacactcgggtcatcaaggaagacattgtgaggagggagcggataggattcagagttcagccagaccaaggaaaaattttttacagcagcataaaagagatgaaacctcccctaaggggacatgggaaaggggcatggggcaaagagaatgttagaaaaactgaggagagtgtgctcaaggttgaggtggacttggaccaaacccagagggaaagaaaaatgcagaatgccctgggaaggggcaaggttgtgccgttgtggcatcctgcacatctgcagaccctccctgtgactcctaacaagcagaagacagacgggagaggcaccaaacctgaagcctcctctcaccaggggacaccaaagcaaacgacagctcagggggctccaaagacctcattcatagcagcaaaaggaactcaggtagtcaaaatatcagtacacatgggacgtgtcagtttaaaacaggagccccggaagagtcatagtcccagcagtgacacatcaaaactagcagctgaaagggacttgaatgtgaccatcagtcttagtactgatagaccaaagcagcgatcacaggcagtagcaaacgagagggcacaccctgccagcacagcagtgccgaagtctggggaagccatggccttaaacaaaactaagactcagagcaaagaagtcaatgcaaataaacacaaagccaatacgagtcttccttttcctaagttcactgtcaattcaaatcgcttaaggaagcaatctattaatgagacacctttgggaagtttgtcaaaggatgatggagctagaggggctcatgggaagaaactcaatttctctgaaagccatcttgtgattataaccaaagaggaagagcaaaaggcagaccccaaagaggtctctaattctaaaaccaaaacaatatttcctaaagtattgggtaaaagccaaagtaaacacatttccaggaatagaagtgagatgtcttcctcttcacttgctccacatagagtgccactgtcccaaactaaccatgctttaactggagggctagagccagcaaaaatcaacataactgccaaagccccctctacagaatacaaccagagtcatataaaagcccttttacctgaagacagtggaacgcaccaggtgttaagaattgatgtgacactttctccaagggaccccaaagctccagggcagtttgggcgtcctgtagttgtcccccatggaaaggagaaggaggcagaaagaagatggaaagaaggaaacttcaatgtctaccttagcgatttgatcccagtggatagagccattgaagacaccagacctgctggatgtgcagagcagctagttcacaataacctcccaaccaccagtgtcatcatgtgctttgtggatgaagtgtggtccactctcctgagatctgttcacagtgtcatcaatcgctctcctccacacctcatcaaggagattctgctggtagatgacttcagcaccaaagactatctaaaagataatttggataaatacatgtcccagtttccaaaagttcggattcttcgcctcaaagagagacatggcttaataagggccaggctggcaggagcacagaatgcaacaggtgatgtgttgacatttttagattctcatgtggaatgtaacgttggttggttggaacctcttctggaaagagtttatttaagtagaaagaaagtggcctgtccagtaatcgaagtcatcaatgataaggatatgagttacatgacagtggataactttcaaagaggcatctttgtgtggcccatgaactttggttggagaacaattcctccagatgtcattgcaaaaaacagaattaaagaaactgatacaataaggtgccctgtcatggctggtggattgttttctattgacaaaagttacttttttgaacttggaacatacgaccctggccttgatgtttggggtggggaaaatatggagctctcattcaaggtgtggatgtgtggtggtgaaattgagatcattccctgctcccgagtgggccatatattcagaaatgacaatccatattccttccccaaagaccggatgaagacagtggagcggaacttggtgcgggttgccgaggtctggctggatgagtataaggagctgttctatggccacggagaccacctcatcgaccaagggctagatgttggcaacctcacccagcaaagggagctgcgaaagaaactgaagtgcaaaagtttcaaatggtacttggagaatgtctttcctgacttaagggctcccattgtgagagctagtggtgtgcttattaatgtggctttgggtaaatgcatttccattgaaaacactacagtcattctggaagactgcgatgggagcaaagagcttcaacaatttaattacacctggttaagacttattaaatgtggagaatggtgtatagcccccatccctgataaaggagccgtaaggctgcacccttgtgataacagaaacaaagggctaaaatggctgcataaatcaacatcagtctttcatccagaactggtgaatcacattgtttttgaaaacaatcagcaattattatgcttggaaggaaatttttctcaaaagatcctgaaagtagctgcctgtgacccagtgaagccatatcaaaagtggaaatttgaaaaatattatgaagcctgaagtgtaactgatgtttttatatagtaaacccattaaatactgtgaaaataaca

SEQ ID NO: 137 - DNA, 4999 bp, Homo Sapiens
atggaggagaagcccggccagccacagcctcagcaccatcacagccaccaccatccgcaccatcaccctcagcagcagcagcagcagccgcaccaccaccaccattattatttctacaaccacagccacaaccaccaccaccaccatcatcaccagcagcctcaccaatacctgcagcatggagccgagggcagccccaaggcccagccaaagccgctgaaacatgagcagaaacacaccctccagcagcaccaggaaacgccgaagaagaaaacaggctatggtgaactaaacggtaatgctggagaaagagaaatatctttaaagaacctgagttctgatgaagccaccaaccctatttccagggtcctcaatggcaaccagcaagttgtagacactagcctgaagcagactgtaaaggccaacacctttgggaaagcaggaattaaaaccaagaatttcattcagaaaaacagtatggacaaaaagaatgggaagtcttatgaaaataaatctggagagaatcagtctgtagataagtctgatactataccaattccaaatggtgtggtaacaaataattctggttatattactaatggttatatgggtaaaggagcagataatgatggtagtggatctgagagcggatatacaactcctaaaaaaaggaaagctaggcgcaatagtgccaagggttgtgaaaaccttaatatagtgcaggacaaaataatgcaacaagagaccagtgtcccaaccttaaaacagggacttgaaactttcaagcctgactatagtgaacaaaagggaaatcgagtagatggttcgaagcccatttggaagtatgaaactgggcctggaggaacaagtcgaggaaaacctgctgtgggtgatatgcttcggaaaagctcagatagtaaacctggtgtgagcagcaaaaagtttgatgatcggcccaaaggaaagcatgcttcagctgttgcctccaaagaggactcgtggaccctatttaaaccacccccagtttttccagtggacaatagcagtgctaaaatagttcctaaaataagttatgcaagcaaagttaaggaaaacctcaacaaaactatacagaactcttctgtgtcaccaacttcatcttcatcatcttcatcatctaccggggaaactcagacccaatcatcaagtcgcttatcccaggtccctatgtcagcgctgaaatctgttacttctgccaacttttctaatgggcctgttttagcagggactgatggaaatgtttatcctccagggggtcagccactgctaactactgctgctaatactctaacacctatctcttctgggacagattcagttctccaggacatgagtctaacttcagcagctgttgaacaaattaagactagcctttttatctatccttcaaatatgcaaactatgctgttgagcacagcacaagtggatctgccctctcagacagatcagcaaaacctgggggatatcttccagaatcagtggggtttatcatttataaatgagcccagtgctggccctgagactgttactgggaagtcatcagagcataaagtgatggaggtgacatttcaaggagaatatcctgctactttggtttcacagggtgctgaaataattccctcaggaactgagcatcctgtgtttcccaaggcttacgagctggagaaacggactagtcctcaagttctgggtagcattctaaaatctgggactactagtgagagtggagccttatccttggaacccagtcatataggtgacctgcagaaagcagacaccagtagtcaaggtgctttagtgtttctctcaaaggactacgagatagaaagtcaaaatcctctggcctctcctacgaacactttgttaggctctgccaaagaacagagataccagagaggcctagaaaggaatgatagctggggttcttttgacctgagggctgctattgtatatcacactaaagaaatggaatctatttggaatttgcagaagcaagatcccaaaaggataatcacttacaatgaagccatggatagtccagatcaatgaaggaccagactgcctattcgtaacctttctgcagcattagagccatcgttcatgggggacacaaggcttttatgctcctagatcttcaacgcagcagaggaaccataagtagaatcacaggataatatatacaaatatatatatatacatatatatatatatagttatttaaaaaaggcaactgaaagtaattagacttcttaaggaatcaaatttatttcaagagactacacatggttatttaatctccggtactgaataggttttttttcttctgttagtttttgtttttaagtgtgaatgcaagtgattaatgaatacagacttaacaagtgtggttctaaagttcctgctgtcatcaacttgggcaacaaatgacccactggaaaggcaaatccacttaaaagatctctgtatcttgttctgtgactgaagtgatacactaatcacggggaacccagaatgattcaacattttccccccactcctcccttgatctttttggttttactttaattaagccctgcgagaatgctggataaatgccttgaagttagcagggtgtatttttttagcgaatatgatttgcatgtcttgccaggagttaagcggcctctggggtgttggggaaatactttatttctttccatttattttttgtggggcggggataggggagggcattgaagttctacaattctggaatagttagttgatggtacatagttaacttggcttcggttacatattggactttaacaactgaagaatctatgcgtgtcatttaaagaaaagttgcagaacaagcaattggcttagatatacaatctggaaaaatattcctgtgcccatattttaatgtaattgtataactgggagcaaaaatatattctgcttttcaactgtaggtgctccagacttgctctccgtcactaacactaaatgtgctgttttccttgtttttcatcaaacatttaagacaaacttagacctttctgtaaattatcttttaatttctcagcaaaatctaaaaggggaagaaaaaagtccatgaaaactaaaacttttcatgtttttagccagtgagaagataataaaccctgactgtagaaggtgtgttttcatgcaaactatacttctgagcttgttagcttctaattatatcttaataaatatattttattactagagcaagatgggtttttaaggaaaataatgtgaaattctggaaattttctttggggcagagaagagcattagccctgtcttatcattacattgccatcctgttgcactgcagcttgtgtatagcatgctaaaataaatttttgtgtgtgtgtgcagaaattaagggtccaattgagattgggtgatgttagtaacataataacaagttgtctggcctgacacagcatcacatcacacacacagaaattagtatatccatgtatgtcaaatacaggttaaaatatcagggcatttatataaagagttgtagtcttctgataaaagtagactggatcccctggggtatttggggagaaagtaactactttggctctacccctagaaatgtccagttttgagtgactgtagtatggatgggttttcttgttttgttgattatttgaggcttttaaaacaagtagttcatgaaagaagctgttggactcaacatagagtagagtaactatctttttagtctggatttctgccctgcttagattttaaaagtataagcatggattgccaattccacttgatgtaaacaaaacttttttttatacataatatatatatatatatataaaataacttattgtatcagtccaggttcagaaacttgtggtaggccagttccagatagtttcatttcacctgtaaactgtatcactttgactgatattgtaattttcaaatgtataatatgtttacagatgtgccctgcatttagtctgccttgttcctattttgatttttgttgagtctcctgcctgcttgccaaaagctaggatgcttcaggcccatgtacaattgaaagcagaggcatccttgagctttaaagcattgaacaaactggaaaatgcaacataccacataactgaagtgaaaaaagtctgtgtttttgtgtttttttaaataaaaattttcaaaaagttaaaaaaaaagacatataaggttgattaaagggaaaaaaggctccagtttgttttacaggttttaaagttctgctgtgtgttcaattgccttgtgtaaccacttgtcgccttagggccagattcccctctctagtccccttttttaaatgtccattttgcttgcctggaattttaaagttcttccgtctcacaactcacaagaaactttctgggtttgtgacatacagaggttgaattgagtatatatttgaaaaggaaaaaacaaaaaacaaacccagaccccacctgaattgggctttttaacttagaagcaacacttgattaaacatctttagaaagctattgcttttctaatttccttccatatccctcaggcctcagtgttcagagaagccaaaaagaatgtatcacttctctgtctgtccaaaggtttttgagagtctcacttctaaatgaaacaatgcaacatttcactttgatttctccactgaaatttccttgattatatggttagaggtatgtagttaggaatgtctgttaactttctgagaaccctagtgccccatcatattaactgtcagtattttgggggcattaggttaatagacttaattgcctaggtacaagcaggactttgggacaaatctctttgtgctgtttggtaacacttaactctatttgttgcaatctttctccttaggtcctcacacaattccttacagagcacttattaaaaaaaaatcttaagagtt

SEQ ID NO: 138 - DNA, 3973 bp, Homo Sapiens
cggacggggccgccccgatgggacgccgcgctccggcccctgcgcgccgctgagccgagcgccccccgctgccgagacccccgccgccaccgccagccgctgccccctcgcccccgcccgggccgggagcctcgtccccgtcccccggaaagctggatttccgaggctggaggcgcctggccggctgggtggggaccaccatgggcaacgcggccggcagcgccgagcagcccgcgggccccgccgcgccgccccccaagcagcccgcgcctcccaagcagccgatgcccgcggccggagagctggaggagaggttcaaccgcgccctgaactgcatgaacttgcccccagacaaggtccagctgctgagccagtatgacaacgagaagaagtgggagctcatctgtgatcaggagcggtttcaagtcaagaatccccccgcagcctacatccagaagctgaagagctatgtggatactggtggggtcagccgaaaggtagcagctgattggatgtccaacctggggtttaagaggcgagttcaggagtccacgcaggtgctacgggagctggagacctccctgaggaccaaccacattgggtgggtgcaggagttcctcaatgaagagaaccgtggcctggatgtgctgctcgagtacctggcctttgcccagtgctctgtcacgtatgacatggagagcacagacaacggggcttccaactcagagaaaaacaagcccctggagcagtctgtggaagacctcagcaagggtccaccctcctccgtgcccaaaagccgccacctgaccatcaagctgaccccagcccacagcaggaaggccctgcggaattcccgcatcgtcagccagaaggacgacgtccacgtctgtattatgtgcctacgcgccatcatgaactaccagtctggcttcagccttgtcatgaaccacccagcctgtgtcaatgagattgctctgagcctcaacaacaagaaccccagaaccaaggctctggtgctggagctgctggcggccgtgtgcttggtgcggggaggacatgacatcatccttgcagcctttgacaacttcaaggaggtgtgtggggagcagcaccgctttgaaaagctgatggaatatttccggaatgaggacagcaacatcgacttcatggtggcctgcatgcagttcatcaacattgtggtacattcggtggagaacatgaacttccgtgtcttcctgcaatatgagttcacccacttgggcctggacctgtacttggagaggcttcggctcaccgagagtgacaagctgcaggtgcagatccaggcgtacctggacaatatttttgatgtgggggcgctgctggaggacacagagaccaagaacgctgtgctggagcacatggaggaactgcaggagcaagtggcgctgctgacagagcggcttcgggacgcggagaacgaatccatggccaagattgcagaactggaaaaacagctaagccaggcgcgcaaggagttggagaccctgcgggagcgcttcagcgaatcgaccgccatgggcgcctccaggcgtcccccagagcctgagaaagcgcctcccgctgccccgacgcggccctcggccctggagctgaaggtggaggagctggaggagaaggggttaatccgtattctgcgggggccgggggatgctgtctccatcgagatcctccccgtcgctgtggcaactccgagcggcggtgatgctccgactccgggggtgccgaccggctcccccagcccagatctcgcacctgcagcagagccggctcccggagcagcgccaccgccgccgcccccactgcccggcctcccctccccgcaggaagccccgccctctgcgcccccacaggccccgcctctccctggcagcccggagcccccgcctgcgccgccgctgcccggagacctgccgcccccacccccgccaccgccaccacctccgggcactgacgggccggtgcctccgccgccgccgccgccgccgccgcctcccggaggtcctcctgatgccctaggaagacgcgactcagaattgggcccaggagtgaaggccaagaagcccatccagactaagttccgaatgccactcttgaactgggtggcactgaaacccagccagatcaccggcactgtcttcacagagctcaatgatgagaaggtgctgcaggagctagacatgagtgattttgaggaacagttcaagaccaagtcccaaggccccagcctggacctcagcgctctcaagagtaaggcagcccagaaggcccccagcaaggcgacactcattgaggccaaccgggccaagaacttggccatcaccctgcggaagggcaacctgggggccgagcgcatctgccaagccattgaggcgtacgacctgcaggctctgggcctggacttcctggagctgctgatgcgcttcctgcccacagagtatgagcgcagcctcatcacccgctttgagcgggagcagcggccaatggaggagctgtcagaggaggaccgcttcatgctatgcttcagccgcatcccgcgcctgccggagcgcatgaccacactcaccttcctgggcaacttcccggacacagcccagctgctcatgccgcaactgaatgccatcattgcagcctcaatgtccatcaagtcctctgacaaactccgccagatcctggagattgtcctggcctttggcaactacatgaacagtagcaagcgtggggcagcctatggcttccggctccagagcctggatgcgctgttggagatgaagtcgactgatcgcaagcagacgctgctgcactacctggtgaaggtcattgctgagaagtacccgcaactcacaggcttccacagcgacctgcacttcctggacaaggcgggctcagtgtccctggacagtgtcctggcggacgtgcgctccctgcagcgaggcctagagttgacacagagagagtttgtgcggcaggatgactgcatggtgctcaaggagttcctgagggccaactcgcccaccatggacaagctgctggcagacagcaagacggctcaggaggcctttgagtctgtggtggagtacttcggagagaaccccaagaccacatccccaggcctgttcttctccctctttagccgcttcattaaggcctacaagaaagctgagcaggaggtggaacagtggaaaaaagaagccgctgcccaggaggcaggcgctgataccccgggcaaaggggagcccccagcacccaagtcaccgccaaaggcccggcggccacagatggacctcatctctgagctgaaacggaggcagcagaaggagccactcatttatgagagcgaccgtgatggggccattgaagacatcatcacagtgatcaagacggtgcccttcacggcccgcaccggcaagcggacatcccggctcctctgtgaggccagcctgggagaagagatgcccctctagcccctcagatctgcggaaccagccctacatccgcgcagacacaggccgccgcagtgcccgtcggcgtcccccgggccccccactgcaggtcacctccgacctctcgctgtagccgctatttctgcaggtggattctgcaggggtgtggggccgtggacaggctgaggctcaaggaaggtggtcctcagctcggctggccgggcagcccctcctccgctgtggcccgcctcaaacgggctggtgcatcctcctcttggccacagagggcagcatcgcccgccccttcccccaaatgctgcttgcagcacccaccctaaagccccctccaaatagccatacttagcctcagcaggagcctggcctgtaacttataaagtgcacctcgcccccgcaagccccagccccgaggaccgtccatggaccttatttttatatgagattaataaagatgtttgcaaaaaaaaaaaaaa

SEQ ID NO: 139 - DNA, 1216 bp, Homo Sapiens
aggataccctgggtcggctcctccacgtgaccacccactatggcttcctagtgtcagggccagctgtgtagtggctcggtgtgatttgttagctctttgaggcagggtaccctcctcaggatttcgatatgcaaaaaatcaaatctctcatgacccgacagggtctgaaaagccctcaagaaagcctcagtgatcttggtgccatagagagtctccgggtccctggaaaggaagaattcagggaacttcgagaacagccaagtgaccctcaagctgaacaagagcttattaatagtattgaacaagtatatttttctgtggattcatttgatattgttaaatatgagctggagaagcttccacctgttctcaatttgcaagaattagaggcgtatagagacaaattgaaacaacagcaagctgcagtatctaaaaaagtggcagatttaatccttgaaaaacagcctgcttatgtaaaggaacttgaaagagttacctcattgcagacaggtcttcaattagctgctgttatctgtacaaatgggagaagacacttgaatattgcaaaggaaggttttactcaagctagtttaggccttcttgcaaatcaaaggaaacgtcagttgctgattggacttctgaaatctctgagaactataaaaacattgcaaagaacagatgtacggttaagtgaaatgctggaggaggaagattatccaggagctattcagttgtgccttgaatgtcaaaaagctgccagcacttttaaacattacagttgtataagtgaactgaattcaaagctgcaagatactttggaacagattgaggaacagctggacgtagctctttccaaaatctgcaagaattttgacattaaccattataccaaggttcaacaagcttatcgacttcttggaaaaacacagacagcaatggatcaacttcatatgcacttcacccaagccattcacaacaccgtgtttcaagttgttcttggttatgtggaactatgtgcaggaaacacagacacaaaattccaaaagctgcaatataaggatctctgtacagtatgtagtgacttaattactattcatatatctctcctttagattttaaatttatatttcctttatcttggtacatacctatttgaaaatgctactaaaataaaaataaatctttgccaaaaaaaaaaaaaaaaaaaaaaaaaaaa

SEQ ID NO: 140 - DNA, 1536 bp, Homo Sapiens
cgcatgcgctggcggcctgcgccgccttaagtgccgcgccagcccggggcggcccagtcggcctgtcagccggcttcgagataagtcccggcgcttgcgcggcggcggctatggcggcggaggaggaggaggtggactctgccgacaccggagagaggtcaggatggctaactggttggctccccacatggtgccctacgtctatatcacaccttaaagaagctgaagagaagatgttaaaatgtgtgccttgcacatacaaaaaagaacctgttcgtatatctaatggaaataaaatatggacactgaagttctctcataatatttcaaataagactccacttgtccttctccatggttttggaggaggtcttgggctctgggcactgaattttggagatctttgcaccaacagacctgtctatgcttttgacctattgggttttggacgaagtagtagacccaggtttgacagtgatgcagaagaagtggagaatcagtttgtggaatccattgaagagtggagatgtgccctaggattggacaaaatgatcttgcttgggcacaacctaggtggattcttggctgctgcttactcgctgaagtacccatcaagggttaatcatctcattttagtggagccttggggtttccctgaacgaccagaccttgctgatcaagacagaccaattccagtttggatcagagccttgggagcagcattgactccctttaaccctttagctggcctaaggattgcaggaccctttggtttaagtctagtgcagcgtttaaggcctgatttcaaacgaaagtattcttcaatgttcgaagacgatactgtgacagaatacatctaccactgtaatgtgcagactccaagtggtgagacagctttcaagaatatgactattccttatggatgggcaaaaaggccaatgctccagcgaattggtaaaatgcaccctgacattccagtttcagtgatctttggcgcccgatcctgcatagatggcaattctggcaccagcatccagtccttacgaccacattcatatgtgaagacaatagctattcttggggcaggacattatgtatatgcagatcaaccagaagaattcaaccagaaagtaaaggagatctgcgacactgtggactgaacacactgaagctctgatgggaaaacctggtgactgatatagttgttcagcaataattcatagtctgtgatgaagagtagtgaatacaacacacaaccaggcagccttcttgactatactttgcacatgttttctttaggaattcactcacacatttaaaccagttagtgccttctagaagaatggctttcctttctcctacacaaaattgaaatatacaagtctctaaatataatacctttaaataaaaggttatttgtccctctgaaaaaaaaaaaaaaaaaaaaaaaaaaaaaaaaaaaaaaaaaaaaaaaaaaaaaaaaaaaaaaaaaaaaaaaaaaaaaaaaaaaaaaaaaaaaaaaaaaaaaaaaaaaaa

SEQ ID NO: 141 - DNA, 4452 bp, Homo Sapiens
ggcgccatttgctgccgccgagcgtggacgcaggcggatctctgaagagctgggtcgccagcctctcccgcgcacgttgcctggcctccagcacctacttggtcccgcgcgctccctcgtgtcgcccctcggagcagcagccgccgcggtcgccgctacccggaaagaagtcagagacgccgcgaggtcgccgccaccgccatgcccaagaataaaggtaaaggaggtaaaaacagacgcaggggtaagaatgagaatgaatctgaaaaaagagaactggtattcaaagaggatggtcaggagtatgctcaggtaatcaaaatgttgggaaatggacggctagaagcaatgtgtttcgatggtgtaaagaggttatgtcacatcagaggaaaattgagaaaaaaggtttggataaatacctcggacattattttggttggtctccgagactaccaggataacaaagctgatgtaattttaaaatacaatgcagacgaagctagaagtctgaaggcatacggcgagcttccagagcatgctaaaatcaatgaaactgatacatttggtcctggagatgatgatgaaattcagtttgatgacattggagatgatgatgaagatattgatgacatctaaattgaactcaacattttacattccatcttttctgaagattgtcctacaatttggattttgatcatgacaaagaagattaaaatttcattagcatgaatgcaatttgttaaagcagactgatttgtttctaagatatttttggtttttttaaaactgataataatgctgaattatcttaagtgagatgttaagcccactttgttcttttaatgtaatggagcttatgggtagaagaccatgtctactaattacaaaaaaaaaaaaaaaccatgcattgctgcttttcctaccacttccagtaagaaaatgggtgttttgaagaaatcatttgccttgtcctcacggaatctgattaagccctggcctcttgattgtatagagtcattgtgtatattccagttacctagatattcccttgagattttgatacaatttgagggaggcagaagtctgcagttgaagaaaaaaaataagtctgtttgtcatatttaagtagcctgtggctatttttatactgattttgatatcatgttcttttcatagtcgtattttgccaccgtaaacataaaaaaaaaaaaaaagatttccaaaatgccgttttcagaacctgggttttaatagcagtattgaatttgtaagcttagtagttgcagaaattgaacactaggtggcactcagttatcttaacaggggaagtactgatacaattgttgacttttcttttactatgtgtaagaaataccccaaacatgaaaagattgttttgatcatatgcatgtatgtagaatatttttgcagagcagaaagattatgttagaagtgtgatttttattttcagaagtcatatacatgtaagctacaattttgagtgctttataaacacttaagatatatatataaattttaatttcatagcaacttgtaaaaaataaaatacttgttgaaaagcctttttcaacatatccctaagctaagggaagaggaaggaataacaactcagtgaaaagatggtctccagtttctgaatgaaaaagctacagctgagaaataaaataaaatgtcatgctgcagaatatgttatacccttattttgtgttaaggatatattttattatgtgaatggttttgtttttgttttttgtttttgttttttgcttgtattgggaattagctttactggtaacttccttatttagtttttagtggtcaactctaataaaatgaaactagggctgagctagttagccctcactagccaaactgaaactctatgcaacattaaaagaagagatccatcatgtagcttgtgacacttttattttattagtcaccggggaacttttcagtgatgaaaatacacagggtaataaaccttcacatggcttcaaaaggaaaacaagcaaatcttctctaatctactcttactataatttcctaagtgtacaccaaactctggatttaaaaatctgaagtactatagaacattaagttgaagaatggaaattaagagtacgtattcatggtttatatttcttattctatggagttcgtgaacacatctaggtggaatgcatctgagactaagggctggtttttaatcctcataagaaaccagccttgaagaattaacaattctcttcattggtattctaaacctcctaagatatttaggcttctgtacataaaagtgtttttgctaaatttacagtatatatagatcctttcatattattttactaagaatgtttgaactttgcatatttgatatagttcctggtaggaatagcacagctcaaacattagtttttctacttacctcctctaacacgtggtttgtctggagagtttctaaaaattcagctataaccccagttcatgtatttactggtgattgttcttgctgaggtagtaacagcccaatcttgggctgttaaatcctaggaaatctcgaatcatagtgattaaaatagttggggtaaagttgtagcttatatgcaatactacttggaggaattcttctactaatttgtatttaatgtggaaattgtatagtttcattgatttaatcataaataatggaaatggtctccaagaagttttatttttcatttttttgcttatacactctgattcctataatacagtgctataagctatgcacagaaaataaaatgtttgaaatccaagaataatggttcttactgctaagagggagtaatagttattactaatgattttgattgggttgcatttttgttgcaatgtttattccacttgcagttagaatatgaatatgttttatcactagtgtggctaaataaccaaacatttgtgtaaaaaaaaaaaaaagccaagatttcattgtttgttgaatatttcttaagcatctggcccctaaagagaccgcttcttaccaagcctgtaaactatgcatgatggaaattcttgtattttatttaggaatggctgttggtttactcaccacatctgtggaatcatggctataaatgtttgcttacaaactctttgtgacttgtaatttaacttaatctcatctaatgtaaatattagattatgatgttcagtaacatcttccataggtataaactgctgtcattattgatttcagagtaactctgagtaatcaaataggtaaaagcatgttttgagtaaaatagctagatttatactttacttgtatacagacttaacaacaaccggtattgactggattgacagctaaagtatcagaatgaaagcaaggtttttttgatgttacctgactgtcataaagatgaaaatgatttgtattggtatgaaatgcttatctttattctacttcgtaagggtaagttttatttatactctttggactcccatgaacttttgcacactgctttgtgtttttggtttaccctaaactaccatcctttttatctttgctttttttcttcctattcagaaaagagcaaaatgtgaaaagacacaagactctcaggtatagaatgaactgagcaatttggagaatgtattggactttgtcctctcttattcccccctcctagccctgcaagttgctaggtacttgtgaggcagtgtactggagaggggagagcatggatcctggggtcaaagggcctttgcccccacccttacttggccctctacctgcaggtgaccactggcacattctcctgcttgtctcagcttcaggttcttcacctctaagatggggatgatgaaaacagtacctgtcatgcagaattgttgggaggattgataatttagatgtttatacatgtaatgtacttagatcagtgtctgctcttttcacttgatatccagtactatgtaagatagaaggtgcatgtcttctgtattctgtatttcccatttcttttgcgtgcagtctttgattcgtacaatagaaggaacacgtagaatgtatatttgtacattcatgtcaacatagtatttgaaattgctaccaaactcatttaatttggcataagactaacagatgaagtctctcatttgcttgaagatattttacaaaataccaactgttctatatttctttagaaaaagattatagttattaatattgatacctctgataatattttattcttaaatcttcagtgattccttttactatagattcatgacagctaattagtactaactgatttagaggtttcctttcccatcatatggaatgatgtaaagaaatcagatacaaactactgcaattagaaaataaaatatgaacaactttcaacaatgaaaaaaaaaaaaaaaaaaaaaaaaaaaaaa

SEQ ID NO: 142 - DNA, 2177 bp, Homo Sapiens
ggaagaaggcccctcggcctcagcagagcgctatcctccactggttacccgggttccccggcttgctaccgggctgctccgtgcatctttccccccaggcgtcaggaactgcgccctcatggcggaggtgaaggtgaaggtgcagccgcctgacgcggatccggtcgaaatagaaaacaggattatagaattatgtcaccagttccctcatggaatcacagaccaagtaattcagaatgaaatgcctcatatagaagcccagcagcgggcagtagccatcaataggttgttgtctatgggtcagttggatctcttaaggagcaatacgggccttttatatagaataaaggactctcagaatgctggtaaaatgaagggatccgataaccaagaaaaactagtatatcaaatcatagaggatgcaggaaataaaggaatatggagcagagatatccgctataaaagtaatttgccattaacagaaatcaacaaaattctgaagaatctggaaagtaaaaagcttatcaaagctgttaagtctgtagcagcctcaaaaaagaaggtgtatatgctctataacctgcagccagaccggtctgtgactggtggagcctggtacagtgaccaggattttgaatctgaatttgtagaggtgcttaaccaacagtgttttaaattcctacagtccaaggcagaaacagcacgagaaagcaaacagaacccaatgatacaaagaaatagttcatttgcctcatcacatgaagtgtggaaatatatctgcgaattgggaatcagtaaggtagagttatccatggaagacattgaaaccatcctgaatacactcatttatgatggaaaagtggagatgacgattattgctgcaaaagaaggcacagttggcagtgtagatggacacatgaaactgtacagggcagtcaatccaatcatccctcccacaggtttggtccgggcaccctgtggactctgcccggtttttgatgactgccacgaaggtggtgagatttcaccatctaactgtatttacatgacagagtggctcgaattttaatagagagctatgaactttattgacattttgcaaatgaagttacttagggagcagataatttaattcatgatggaacacgaaatctccttgaaagcaaacttcacaataatggacgtagacttgctgctatgaaaacatattttttttatttatgaagactaaatttatattggtaaaatagccagtagaatatgaaagaaataaggttagtagtgaaattcattcttcaataaataaaacactttgaaactccggaggaccacatctttcaagacttctgatgggtcaaggaaaaagatgccaacatacccgtatttaccaagtactatgataatggctagagtataaaaatgttctttttaaagttatttattaagttcttcattggaagtttttttttatatctggttcactaccaccattttctgtttcctactttctcagtggtttcattgaaaagaaattagaaggggttaaaggcaggaatagcaaagagtgcaaacttggggtatgactgggggagagtggaacatgccttttccgcacaatattaattcctttttgtatcagaaatgttcttttaggagattatgctaccatacttacttcaaacccaatgactactgtcaaggacatattttcagtacataaatactatcattttcattctaaagaatattttcactgttccttctttcttaaagtcttatgtttcactctttaactcaaatgtattctttgttagaatttaccctagattcttatttaatgtctgcagtagactgaatgtttgtgtgcccccagaattctaatgttgaaatctcatttccaatgtgatggtatttggaggtggggcttttggtaagtgataggtcaggagagtaacagcgctcatgaatgggattagtgcccttatataaagagacccagagagctccatcaccccttctgccatgtgaaagggagaagacaaacatccacgaaccaggaagtgggtcctcaccagaaaacaaatctgtaagcaccttgatcttggacttcccagcctccagaattgtgagaaataaatttctgttgttgataaaaaaaaaaaaaaaaaaaaaaaaaa

SEQ ID NO: 143 - DNA, 7241 bp, Homo Sapiens
ggaaagaagtggaataattaggaacctagggtggggtagggtagcaggacatttcaaacattaatgagcatatgagattccaggtcttgttaaaatgcaaattctgattcagctggtaggtgaggtctgagattgtgcatttctaacaagcactcagataatcttaaggctgttggccccagggtcacacttatagtgattttctagaacccagttggggaagtgaatcttgggcaggagaaatacacacctcttgcattgagtttggagatctcatctgatataactttttaagaaagaaaaataattttccaaatatccaattgataagctttcccactaagtggctttcccactaagtggctgcgttatgaaaattgcttcactttgaaacttctggtcttggtaatatagaatttctgtgttctcacagtgcttgattgagaatatgatattgagattatggcataaaatatagtggctgtacaaaaaaaaatacattattaggatctctaacaattatgtaaaagtcattgcttcatgggtagagctcaaactttggtgtgagacctggttttattcttggcacttactctgagttgtcttaggcaaattaataccttaagcaaaaatattctcatgtacattttacatgagaattataaatgaagtacataaagtccagcagtcacaaatgttatctattattaccatcgtcctaagactgcaatcagctatagtgaaagtagtctcaaagattgtttcataaatcatcagattcacctaattttctaaagaatttaaataaggagatggaatgaatagattgcattttgtttccatgcacaggggaactgtgcatatttcttctgtgactcggaaatggtttaacttttaaaaatcccaaaatagctgaagttagcagacatgcaatttaccaaggatgattggaatttttatctttcctgtaataatactatacccaagcacactgctcatgaggaaaacatttttatgtgaatcttttactcttgggggcaaagaatgctgtttttctttttgataactatgtttatagaatctaaatcaccctgagcaattatttcaacatctaaagttattattaccattcatgtttcatttatagctatttgaattttgatgaatttcaatatggtgctacagtgatagggcaagtgcaaataagttcaatatatgggtacggtctaaagctattttaatttttttattacaactgctatgaagaaaattaggatatgccatattttcacgttttacagttggatgtcctatgatgttctcttccagagaacagagctcggagctctggaaatttggaggcaactgatatgtgctcatgtctgcatctgtgtgggttggctgtatctcagggacagagtctgcagcaaaaaagatataattttgaggactgaacaaaattcaggaaggactattctcattaaggcagtaacagagaagaattttgaaacaaaagattttcgagcctctctagaaaatggtgttctgctgtgtgatttgattaataagcttaaacctggcgtcattaagaagatcaatagactgtctacaccaatagcaggattggataatataaacgttttcttgaaagcttgtgaacagattggattgaaagaagcccagcttttccatcctggagatctacaggatttatcaaatcgagtcactgtcaagcaagaagagactgacaggagagtgaaaaatgttttgataacattgtactggctgggaagaaaagcacaaagcaacccgtactataatggtccccatcttaatttgaaagcgtttgagaatcttttaggacaagcactgacgaaggcactcgaagactccagcttcctgaaaagaagtggcagggacagtggctacggtgacatctggtgtcctgaacgtggagaatttcttgctcctccaaggcaccataagagagaagattcctttgaaagcttggactctttgggctcgaggtcattgacaagctgctcctctgatatcacgttgagaggggggcgtgaaggttttgaaagtgacacagattcggaatttacattcaagatgcaggattataataaagatgatatgtcgtatcgaaggatttcggctgttgagccaaagactgcgttacccttcaatcgttttttacccaacaaaagtagacagccatcctatgtaccagcacctctgagaaagaaaaagccagacaaacatgaggataacagaagaagttgggcaagcccggtttatacagaagcagatggaacattttcaagactctttcaaaagatttatggtgagaatgggagtaagtccatgagtgatgtcagcgcagaagatgttcaaaacttgcgtcagctgcgttacgaggagatgcagaaaataaaatcacaattaaaagaacaagatcagaaatggcaggatgaccttgcaaaatggaaagatcgtcgaaaaagttacacttcagatctgcagaagaaaaaagaagagagagaagaaattgaaaagcaggcacttgagaagtctaagagaagctctaagacgtttaaggaaatgctgcaggacagggaatcccaaaatcaaaagtctacagttccgtcaagaaggagaatgtattcttttgatgatgtgctggaggaaggaaagcgaccccctacaatgactgtgtcagaagcaagttaccagagtgagagagtagaagagaagggagcaacttatccttcagaaattcccaaagaagattctaccacttttgcaaaaagagaggaccgtgtaacaactgaaattcagcttccttctcaaagtcctgtggaagaacaaagcccagcctctttgtcttctctgcgttcacggagcacacaaatggaatcaactcgtgtttcagcttctctccccagaagttaccggaaaactgatacagtcaggttaacatctgtggtcacaccaagaccctttggctctcagacaaggggaatctcatcactccccagatcttacacgatggatgatgcttggaagtataatggagatgttgaagacattaagagaactccaaacaatgtggtcagcacccctgcaccaagcccggacgcaagccaactggcttcaagcttatctagccagaaagaggtagcagcaacagaagaagatgtgacaaggctgccctctcctacatcccccttctcatctctttcccaagaccaggctgccacttctaaagccacattgtcttccacatctggtcttgatttaatgtctgaatctggagaaggggaaatctccccacaaagagaagtctcaagatcccaggatcagttcagtgatatgagaatcagcataaaccagacgcctgggaagagtcttgactttgggtttacaataaaatgggatattcctgggatcttcgtagcatcagttgaagcaggtagcccagcagaattttctcagctacaagtagatgatgaaattattgctattaacaacaccaagttttcatataacgattcaaaagagtgggaggaagccatggctaaggctcaagaaactggacacctagtgatggatgtgaggcgctatggaaaggctggttcacctgaaacaaagtggattgatgcaacttctggaatttacaactcagaaaaatcttcaaatctatctgtaacaactgatttctccgaaagccttcagagttctaatattgaatccaaagaaatcaatggaattcatgatgaaagcaatgcttttgaatcaaaagcatctgaatccatttctttgaaaaacttaaaaaggcgatcacaattttttgaacaaggaagctctgattcggtggttcctgatcttccagttccaaccatcagtgccccgagtcgctgggtgtgggatcaagaggaggagcggaagcggcaggagaggtggcagaaggagcaggaccgcctactgcaggaaaaatatcaacgtgagcaggagaaactgagggaagagtggcaaagggccaaacaggaggcagagagagagaattccaagtacttggatgaggaactgatggtcctaagctcaaacagcatgtctctgaccacacgggagccctctcttgccacctgggaagctacctggagtgaagggtccaagtcttcagacagagaaggaacccgagcaggagaagaggagaggagacagccacaagaggaagttgttcatgaggaccaaggaaagaagccgcaggatcagcttgttattgagagagagaggaaatgggagcaacagcttcaggaagagcaagagcaaaagcggcttcaggctgaggctgaggagcagaagcgtcctgcggaggagcagaagcgccaggcagagatagagcgggaaacatcagtcagaatataccagtacaggaggcctgttgattcctatgatataccaaagacagaagaagcatcttcaggttttcttcctggtgacaggaataaatccagatctactactgaactggatgattactccacaaataaaaatggaaacaataaatatttagaccaaattgggaacatgacctcttcacagaggagatccaagaaagaacaagtaccatcaggagcagaattggagaggcaacaaatccttcaggaaatgaggaagagaacaccccttcacaatgacaacagctggatccgacagcgcagtgccagtgtcaacaaagagcctgttagtcttcctgggatcatgagaagaggcgaatctttagataacctggactccccccgatccaattcttggagacagcctccttggctcaatcagcccacaggattctatgcttcttcctctgtgcaagactttagtcgcccaccacctcagctggtgtccacatcaaaccgtgcctacatgcggaacccctcctccagcgtgcccccaccttcagctggctccgtgaagacctccaccacaggtgtggccaccacacagtcccccaccccgagaagccattccccttcagcttcacagtcaggctctcagctgcgtaacaggtcagtcagtgggaagcgcatatgctcctactgcaataacattctgggcaaaggagccgccatgatcatcgagtccctgggtctttgttatcatttgcattgttttaagtgtgttgcctgtgagtgtgacctcggaggctcttcctcaggagctgaagtcaggatcagaaaccaccaactgtactgcaacgactgctatctcagattcaaatctggacggccaaccgccatgtgatgtaagcctccatacgaaagcactgttgcagatagaagaagaggtggttgctgctcatgtagatctataaatatgtgttgtatgtcttttttgctttttttttaaaaaaaagaataactttttttgcctctttagattacatagaagcattgtagtcttggtagaaccagtatttttgttgtttatttataaggtaattgtgtgtggggaaaagtgcagtatttacctgttgaattcagcatcttgagagcacaagggaaaaaataagaacctacgaatatttttgaggcagataatgatctagtttgactttctagttagtggtgttttgaagagggtattttattgttttttaaaaaaaggttcttaaacattatttgaaatagttaatataaatacataattgcatttgctctgtttattgtaatgtattctaaattaatgcagaaccatatggaaaatttcattaaaatctatccccaaatgtgctttctgtatccttccttctacctattattctgatttttaaaaatgcagttaatgtaccatttatttgcttgatgaagggagctctattttctttaccagaaatgttgctaagtaattcccaatagaaagctgcttattttcattaatgaaaaataaccatggtttgtatactagaagtcttcttcagaaactggtgagcctttctgttcaattgcatttgtaaataaacttgctgatgcatttaacgagtgggtcgtctttttcttaggtgtatgtgtctgacctcaggccttttagccatatttcagtatgtggccttttttgatgttatgttttatccagtagctttactaaggtataattgatgtaataaactgcatatatttaaagtgtatactttgacaaattttgacatggtgtataccttcgaaactatgccacagtctggatgtgtttactgaaacattttaataaggaagtttatttttgataaagttatgtttttggatacaatatatttgtatggtgagagtgatgaattgttggatcatttgaataaaatcttttactaaccccatgataaaaggagaagacaacagtgagcttagaatatctataaagcaaaaaatgtagtctcttgtttaaaaaatctggagcgggaatgcaaggatacaaaactttagcatgctttgagcaaaaatttaaacttactggaatcttttataataatgtaagtggaatggaggattctaggaactgagaactgtattggaataggttcaaaatatgtaagaaatgctaatgtgggagataaaaattttatttagtacttattctgattattattaaagtaataatgtgttccttgaggataacttgtcaaatgccccaaagcataaagaatataattctgaatcccaaattccaaagacaagaactctgtgtttgaattcattctgcatataattatttataagtatagattgtgaatttttccatgttcttaaaattatttttatcttttttcatggttgcatagtgctccattgtttggccttggtaatatttagttgataattccattactgtgtatttttcacttgtttctaagatcaaacattttaatatgtgcatgttatatataaatatgtaaattctgtgatactctatgatcatctctttctttatattattttcatagacatgaaatagttgctcagagattatgcattttaagacactcatagtatatattgccaaagtggtttccagaaaggcactgctggcttcgactcctataagcagcacgtgggcttgttcatctcactgcatgtttatgaagatacagttcttttgccttgttctctgcctgatgtgtatgcagaggcagccctcaatatgcagtggttgaataaatgaatgaagaaaccactaaaaaaaaa

SEQ ID NO: 144 - DNA, 524 bp, Homo Sapiens
cttgacaccagcagggtgacatccgctattgctacttctctgctcccccacagttcctctggacttctctggaccacagtcctctgccagacccctgccagaccccagtccaccatgatccatctgggtcacatcctcttcctgcttttgctcccagtggctgcagctcagacgactccaggagagagatcatcactccctgccttttaccctggcacttcaggctcttgttccggatgtgggtccctctctctgccgctcctggcaggcctcgtggctgctgatgcggtggcatcgctgctcatcgtgggggcggtgttcctgtgcgcacgcccacgccgcagccccgcccaagaagatggcaaagtctacatcaacatgccaggcaggggctgaccctcctgcagcttggacctttgacttctgaccctctcatcctggatggtgtgtggtggcacaggaacccccgccccaacttttggattgtaataaaacaattgaaacaccaaaaaaaaaaaaaaaaa

SEQ ID NO: 145 - DNA, 2567 bp, Homo Sapiens
attcagctctccgctccgctgggacccgcacagcgccagtggctcgggggtcggccctcgcctcctccccggcccgggcctagagccacccctaaccagaggccggagacagctggagcggctgccgcatcccggcccagcctcccctaccatccctcccccttccactggacatctggaccctaggcccccgcaccgacagggttccggaaaccctccccgcccagcccggcggccgggccccgcgcctctctctctctagagcccccagccctcctcaagactagacttccgcctacccctggacacctcctcccggtcccctccctccccccctcccacagcctggaccggggtaggagggagggggggtgtgcgcccggcgccatccccgccccgccccccgtgattccccctgcatggccggcccgggtggggggcgcgggggggcccgggcgccatgcggggggggcacaaagggggtcgctgtgcctgtccccgtgtgatccgaaaagtgctggcaaaatgcggctgctgcttcgcccgggggggacgtgaatcctattccattgcgggcagtgaggggagtatatcggcttctgctgcctccggtctggctgccccctctggccccagctctggcctcagctctggcccctgttccccaggccccccagggcccgtcagtggcctgaggagatggttggatcattccaaacattgtctcagtgtggaaactgaggcagacagtggtcaggcaggaccatatgagaactggatgttggagccagctctagccacaggagaggagctgccggaactgaccttgctgaccacactgttggagggccctggagataagacgcagccacctgaagaggagactttgtcccaagcccctgagagtgaggaggaacagaagaagaaggctctggaaaggagtatgtatgtcctgagtgaactggtagaaacagagaaaatgtacgtggacgacttggggcagattgtggagggttatatggccaccatggctgctcagggggtccccgagagtcttcgaggccgtgacaggattgtgtttgggaatatccagcaaatctatgagtggcaccgagactatttcttgcaagagctacaacggtgtctgaaagatcctgattggctggctcagctattcatcaaacacgagcgccggctgcatatgtatgtggtgtactatcagaataagcccaagtcagagcatgtggtgtcagagtttggggacagctactttgaggagctccggcagcagctggggcaccgcctgcagctgaacgacctcctcatcaaacctgtgcagcggatcatgaaataccagctgctgctcaaggattttctcaagtattacaatagagctgggatggatactgcagacctagagcaagctgtggaggtcatgtgctttgtgcccaagcgctgcaacgatatgatgacgctggggagattgcggggatttgagggcaaactgactgctcaggggaagctcttgggccaggacactttctgggtcaccgagcctgaggctggagggctgctgtcttcccgaggtcgagagaggcgcgtcttcctctttgagcaaatcatcatcttcagtgaagccctgggaggaagagtgagaggtggaacacagcctggatatgtatacaagaacagcattaaggtgagctgcctgggactggaggggaacctccaaggtgacccttgccgctttgcactgacctccagagggccagagggtgggatccagcgctatgtcctgcaggctgcagaccctgctatcagtcaggcctggatcaagcatgtggctcagatcttggagagccaacgggacttcctcaacgcattgcagtcacccattgagtaccagagacgggagagccagaccaacagcctggggcggccaagagggcctggagtggggagccctggaagaattcggcttggagatcaggcccagggcagcacacacacacccatcaatggctctctcccctctctgctgctgtcacccaaaggggaggtggccagagccctcttgccactggataaacaggcccttggtgacatcccccaggctccccatgactctcctccagtctctccaactccaaaaacccctccctgccaagccagacttgccaagctggatgaagatgagctgtaactggtgaaaaccatgggggtggtgctgactcagccgcctattccccaaggagcttcagggcagtccttctggcactgctccagaattcctccttcttggtgtgtctggagggtgggcaaggctgggagggatatcaacttggaggagaacacctagacccaaggacttttttctgcccaaggaacacagtttccttcagctcccatccctatgcatgcatcatggtccccccaaaaggaggatatgtgggtgggtgggagggctggggcaggggccagatagaaattattggttttgttttttaattttgtttttcctgttttctgagaataaaggttttgttataacaaaaaaaaaaaaaaaa

SEQ ID NO: 146 - DNA, 3994 bp, Homo Sapiens
gcccgctccagccgccgcgcatcctcggcccgcgccccgagacccgcgcccagctagccccggccccgctcggcgccccaggcagctcggctgcgctcgccgcgggacggcgcggccatgaggctgcggggatgcggaccccgggccgcccctgcctccagcgcaggggccagcgacgctcggctgctggcgcccccggggcggaaccccttcgtgcacgagctgcgcctcagcgccctgcagaaggcccaggtggccctcatgacactgacgctcttcccggtccggctcctggttgccgctgccatgatgctgctggcctggcccctcgcacttgtcgcatccctgggctctgcggagaaggaacccgagcagcccccggccctgtggaggaaggttgtggacttcctgctgaaggccatcatgcgcaccatgtggttcgccggcggcttccaccgggtggccgtgaaggggcggcaggcgctgcccaccgaggcggccatcctcacgctcgcgcctcactcgtcctacttcgacgccatccctgtgaccatgacgatgtcctccatcgtgatgaaggcagagagcagagacatcccgatctggggaactctgatccagtatatacggcctgtgttcgtgtcccggtcagaccaggattctcgcaggaaaacagtagaagaaatcaagagacgggcgcagtccaacggaaagtggccacagataatgatttttccagaaggaacttgtacaaacaggacctgcctaattaccttcaaacctggtgcattcatccctggagcgcccgtccagcctgtggttttacgatatccaaataaactggacaccatcacatggacgtggcaaggacctggagcgctggaaatcctgtggctcacgctgtgtcagtttcacaaccaagtggaaatcgagttccttcctgtgtacagcccttctgaggaggagaagaggaaccccgcgctgtatgccagcaacgtgcggcgagtcatggccgaggccttgggtgtctccgtgactgactacacgttcgaggactgccagctggccctggcggaaggacagctccgtctccccgctgacacttgccttttagaatttgccaggctcgtgcggggcctcgggctaaaaccagaaaagcttgaaaaagatctggacagatactcagaaagagccaggatgaagggaggagagaagataggtattgcggagtttgccgcctccctggaagtccccgtttctgacttgctggaagacatgttttcactgttcgacgagagcggcagcggcgaggtggacctgcgagagtgtgtggttgccctgtctgtcgtctgccggccggcccggaccctggacaccatccagctggctttcaagatgtacggagcgcaagaggacggcagcgtcggcgaaggtgacctgtcctgcatcctcaagacggccctgggggtggcagagctcaccgtgaccgacctattccgagccattgaccaagaggagaaggggaagatcacattcgctgacttccacaggtttgcagaaatgtaccctgccttcgcagaggaatacctgtacccggatcagacacatttcgaaagctgtgcagagacctcacctgcgccaatcccaaacggcttctgtgccgatttcagcccggaaaactcagacgctgggcggaagcctgttcgcaagaagctggattaggacccagggttgcggagagacgcggcccctcccgcgtggacatcaccgccatgagcctctttgcgagtgacctctgggctccgctcctcactcctgctgtacaggcactgtcttcagcccgagttccaggggcctcgggggctgtttgtatcttgttcctttgtgaagtgtgttgcagaaccgacgcttactgtgcgagaatcggagggcgcgcacgcggatcccccgcctggcctggaccccgtggggtcaggttccctgccgggcggggggcaccggtgccgccccgtgttctcccacggggccctggtttcgagtctctgtcacagcctcttccggcggcagcgtgcaccgggcgggcctccgtgcacactcagcacacgcctgccacacagcgtgcgcttgcgtgtcactctggcacgaaacctgtctgcctctgtggatccacagcctggcagagccgagccgtcacctgatttttcagtgtttctacctgtgtgctggagctcatgagtattttataaactccatttaggtacttcaggaaacatgcagcattttttaaaaaatgaaaattgtttttctacttcatttttccttttagagtcaaaggatatttatttataggcctttttttttttaatatagaatctgaggctgtttgggctttgacttaaatttccatcaggcctctctccagcaggtaatccctctccttccgctgggtcccctggggaggtgtgaactcaagggcctagccccaaaacactttttctgcttttcttaatccttttccagtcccctctttttttataaacgttggcagtttgatgtttctgtttcggcataacgtaatccatttcactgtagcctaaactccagtccgaggttggatattgttcaaatgagcagggcccgagctggaagcgcaaggcagccgccgccgtgccgctcctcccttgccctcaggccaggtccctgctggaagcggctgcatcttcctgtcagccctggtttccatggtgactggcgtcacgcagccacccgagtatggctgaccttcctgcagagagaggagccgcagtcttttgcttgtggaaggagacgctgggctgtgcggtgcggagggtgatgaggatgtctggtgacagccgtgcggacaccactcctctctgcagcactgcctcccagcgccagggtcgcgggcacatcccactgagagcgggggtcctgccccatcttagagtcaaaggcagaggggcttccaggccctggatggggtattttggtgtcacctgaagtccctctgacatcaccttgtttcatcattttttatgacagaattagaaacccatccttcaagcacaataatcatcacagacttgagtttgcttcctaaagcaaaggctccgggtttgtttggaaaatttttttgatttctgaaatgaattgatttttatatttggggcatctctatagaaagtgaccaccaaggccagtaagtacgggaaaaaatgtttactaacttcctcagagattcgtgatacgcgtttctccactgacagacatttaaaaacaaccttcagctccgtttcaatcaatcacctcgacttgttttttagcatggacactgccagcaggacagacagggatggagtaaaccgaagtcaatttcagggctcttggcgtgttggacacagaagaaatcctagtgcagcctttggtagctaacagtcactgattttataattggagaatgcgtaaagattcatttttcaaggagaagagcctgcaaatggccaatgaaggaggtaaataaactaagatattccgagggaagggacccaggccacctcccttccgcaggtctgcagatgaagggttttttgaatgaaatgccactgtgcattttcagaaaaaaaaatctctgataaacagactttgaatggatgtttgttcctcctgattctcttttctcttcgtggcgacttagagttggcggatattcggaactgtgaatgtacatagcgttgagttaaaccccttgtgtgtgagacaggacgcagcgggcccctggtggcctgggggccagacccgtgggcaggtggggcatgggccctggcctgcggggacctgctggggtgtgagggcagagggagggttgccatgaaggaacttgggattttcaatggaataagtaaaacataaagtctatacttgggaaaaaaaaaaaaaaaaaaaaaaaaaaaaaaaaaaaaaaaaaaaaaaaaaa

SEQ ID NO: 147 - DNA, 3179 bp, Homo Sapiens
ctggaccaggcggccgtggcgcgggtggcggctgctgtgctggctgtggggacggaggcggtgaagtgccatcttcggctaggtcgtcacaggctccggctcatggcatcaagtggcatccatcataagatcgttaactgaagacaatatgcaaaattctcacatggatgaatacagaaattctagtaatggcagcacaggcaacagttcagaggtagtggtagaacatcctactgatttcagtactgagattatgaacgttacagaaatggaacagtcacctgatgactctcccaatgtgaatgcatctacagaagaaactgaaatggcaagtgctgtggaccttccagtgacgctgacagaaacagaagcaaatttccctccagaatatgaaaaattttggaaaactgtagaaaataatcctcaggattttacaggctgggtatatttgcttcaatatgtagaacaggagaatcacttgatggctgccaggaaggcatttgacagatttttcatacactatccgtattgctatggttactggaaaaagtatgcagaccttgaaaagcggcacgacaacattaaaccatcagatgaggtgcgttaaacctctacagtttgtcaagctttgcagtgcaagcctctgtattacactgcagcttaacaagtagggcagggcttttctctcacttacatttatttctcattttccaaacaatatagttggtttgctagtcacatttgctacgtcttattgcatttttggtcagacgctgtcattgatgctctaatgggtctgtgccctatggtctgtaacccaaagcctgcccacacaacccggtcagaatgcagggactgctgcgctttgaagatcaagactctgcacgtggggatcagaacattgccatgttctatccaacctccacccaaatggtttatcggcgggggcttcaggcaatacctcttagtgttgacctttggatacattatataaacttcttaaaagaaacattggaccctggtgatcctgagacaaacaatacaataagaggaacttttgagcatgctgttctagctgcaggaacagatttccgttctgacagactgtgggaaatgtatataaactgggaaaatgagcagggaaacctgagagaagttacagctatatatgatcgtattcttggtattccaacacagctgtatagtcatcattttcagagatttaaagaacatgtacagaataatttgcctagagatcttttaactggtgaacagtttattcagttgcgaagggaattagcttctgtaaatggtcatagtggtgatgatggtcctcctggtgatgatctaccatcgggaattgaagacataaccgatcctgcaaagctaattacagaaatagaaaacatgagacatagaatcattgagattcatcaagaaatgtttaattataatgagcatgaagttagtaaaaggtggacatttgaagaaggtattaaaagaccttactttcatgtgaaacctttggaaaaggcacaactaaaaaactggaaagaatacttagaatttgaaattgaaaatgggactcatgaacgagttgtggttctctttgaaagatgtgtcatatcatgtgccctctatgaggagttttggattaagtatgccaagtacatggaaaaccatagcattgaaggagtgaggcatgtcttcagcagagcttgtactatacatctcccaaagaaacccatggtgcatatgctttgggcagcttttgaggaacagcagggtaatattaatgaagccaggaatatcttgaaaacatttgaagaatgtgttctaggattggcaatggttcgtttacgaagagtaagtttagaacgacggcatggaaatctggaagaagctgaacatttgcttcaggatgccattaagaatgccaaatcaaataatgaatcttcattttatgctgtcaaactagcccggcatcttttcaaaatacagaaaaaccttccaaaatcaagaaaggtgcttttggaagcaatcgaaagagacaaagagaacacaaagttatacctcaatttacttgaaatggaatatagtggtgacctcaaacaaaatgaagaaaatatcctaaattgttttgacaaagctgtacatggttcattacctattaaaatgagaattacattttctcagagaaaagtggaatttcttgaagattttggttccgatgttaataagcttctgaatgcttatgatgaacatcaaacactcctgaaagaacaggattctttaaaaaggaaagcagaaaatggatcagaagaaccagaggaaaagaaagcacatacagaagatacaacttcatcatctacacagatgattgatggtgatttacaggcaaaccaagctgtatataattatagtgcgtggtatcaatacaattatcagaatccttggaattatggacaatattatcctccccctccaacctgatgggaaaaatgtaaatttcaaatgcagtgtgtgaaaagtatgaaattattattttttttaatgagggatgtaaacagtataagcttgttgtatttgataacctgtcttccttgtttctgtgtaacatgatttgtttagtaatagggggaaaatgtcaattagtagcttaccacagatactgtttcctaccatttataaaatttactttttattgaaaaactattttttgatttttgcattaagtggtctagaattcttttgcaatgcatttgcaacagaattttgtagccttaaggggtaggaagaaaaacctgactgcaaatcatgtcagtgtagtacaaaattctgaaaacacataagggctggttatttacctccttttttttttttttttttaaagaaaaaaggacttttaacctttgctgacaaggttttgtctgtttcagttatacttgtgaattgtgatctaactgcagaaaggatacattattaaaatactttgccttggaatagattataaatgagaaaatggaatgtttgcatccctttaaaaatgaaaatcatatcaaaagtatgttgtttcaggagactttgtatttagaatattcatgtaaaacttgtgaacaagctttcattttgatcaaactgatcttcatttttgtaataaaacggaagactcatccagt

SEQ ID NO: 148 - DNA, 3199 bp, Homo Sapiens
gcagtcgcagctgaccctcgctcccgcccccgcctggagtccgacgtggaagttgctggctgactgggcttgcgaggaaaccgcctcggagctgcagccgaaggccaaggaatcactgaagatcggcgagggaggacagggggttcatcatgggtggctttttctcaagtatattttccagtctgtttggaactcgggaaatgagaattttaattttgggattagatggagcaggaaaaaccacaattttgtacagattacaagtgggagaagttgttactactatacctaccattggatttaatgtagagacggtgacgtacaaaaaccttaaattccaagtctgggatttaggaggacagacaagtatcaggccatactggagatgttactattcaaacacagatgcagtcatttatgtagtagacagttgtgaccgagaccgaattggcatttccaaatcagagttagttgccatgttggaggaagaagagctgagaaaagccattttagtggtgtttgcaaataaacaggacatggaacaggccatgacttcctcagagatggcaaattcacttgggttacctgccttgaaggaccgaaaatggcagatattcaaaacgtcagcaaccaaaggcaccggccttgatgaggcaatggaatggttagttgaaacattaaaaagcagacagtaattcagtccattcttctcccctgaaatgaagactacatcacctctctccctttggaaacagtcaagtgtacttcacactactagatgttaaaactatatgattattggcatatactgactgactgcaatatttgtagtaaatagggaaaataagtatttagttggagggataatttgatcgaatcacctgaatgttctatgtaatgtaaaatattcttttcttgctttcttgtgttaaggtatatattctatttgtatggaattcttattcaaatacagttctattaaagagtatactcctattggatgaaaaaaacctatttttgaatagtagttgcagcttgtttgtataaatactaaaaaatatcttaacagatttttttccccttaaaatgaattatctttccaaagattagactcagtatgagagtaggtgaggaacatagtttgtgtaatataatctttatttgcttacctgaccactttttattaagctgttttgtttaaaagcttttggttataggcatgaatattgttttgatggttaacttcactgacttatctgtaagtgtcattttatagtactttacagttgtcaaaaaaaatcttacatatattgatctagttgatcggtagaggaagcttgtgaagtaggtaggacaggttatgatgtcttcactgtatggacgtgaacccagggttctaataggttggcttgcccaaggtcacctgctagcttgtaaggtaggaatagggctcaaagtaaaacttttggttcagaagcttgactcataaactatactatatattcccaaaaatgtcagtattgacaacacagtctaactcttaaataaaattatgctaattagttacattcaaaataatgtttataaatttatttgtctatactagtagaagtgatcagtgacatactataaataatcctaaatggttatatttgatagaattcataacacattaaagagaaaatttcacattaaaggaaggtttaaaaatctattttcagattataaaaggtgtctttactggttttcattccttttatctacatgtaattggacatgtaaacttgttaaaaatcaaaatcttactgattgtacagggagaaattaagcattctgttttaaaaattaggcttattgctagactgtaagtttaaaaacaattcatgttcaaaggagcttttcaaattacccagtccaccacagaatcagctaatgtgacagaagtaaatatagtgcgtcataattgctaaaaacagggtgaatttctttcacttaagttggaaaaccagcctctaaaaaattaggtgctggtaatgagagcttaataccatggttccctgcaggtctcagaaacattagtagttcctttcttggccctcactgtccttccagtgttggcctctggcctcttcccctcacatttatgttcattctccgggcttatattcattctctgctgctttctcccttcacccgtgggactctcacccttcttgctcattctccagcacccattcctactttagtctctttgaaatcttttttggagattttccttcagctacaaatgttccagtacaaccaatattactcctgaggggcaaagactttttcatatttatgtccctagtatctggtatggcgcctggcatatggcatttcagaatatgttcatagttgaaacagtaggatagatatttgtcatcttgacaagtagccctttgcaatttatacttgagttcactcctggtcaatggcacatggctggaaaatgcagaaagcaagttcacttacagcctgaggcttataaagcttgtacagctgcctcccggcagtccaggaaaactgcaaaaaatgggaagtaaggtcctggcaggcagacccggcatgtagccgctggccatcttgaatcctagggcatgaagttgccccaaagttcagcacttggttaagcctgatccctctggtttatcacaaagaataggatgggataaagaaagtggacacttaaataagctataaattatatggtccttgtctagcaggagacaactgcacaggtatactaccagcgtttggatattgatatatacatggcaaatctgaatattgttttatgagaggcctggcaatgggtaaaacaccaaacttgaaatcagaacataggtgcaaatggccactcctgtagtttcttttctgtaaaatgggatctggacgaatgataccaaacgtttctttctaacattgtattttataactctggcctatgattgtgttgtgtcttgcattaaaaaaaaaaatttgagagtggtagaattacttctgttatctgaaatacctgagatgcactttaaactgttgaaatgtaagctctgagggcagggaccgtatcttatttactgttagtatccgttgcatctagtgtggtgcacctggcacacagtaggcactcaataaatatgtattgattaaaaacaaa

SEQ ID NO: 149 - DNA, 4703 bp, Homo Sapiens
cgccgatggtacgcgccggctcgcctggcccggctgcagtggatgttgctagaacccacgcggaggaaggaagagacgcaggcaggctgcggttacccaagcggccacccgggcctcagggaccccttccccgagagacggcaccatgacccagggaaagctctccgtggctaacaaggcccctgggaccgaggggcagcagcaggtgcatggcgagaagaaggaggctccagcagtgccctcagccccaccctcctatgaggaagccacctctggggaggggatgaaggcaggggccttccccccagcccccacagcggtgcctctccaccctagctgggcctatgtggaccccagcagcagctccagctatgacaacggtttccccaccggagaccatgagctcttcaccactttcagctgggatgaccagaaagttcgtcgagtctttgtcagaaaggtctacaccatcctgctgattcagctgctggtgaccttggctgtcgtggctctctttactttctgtgaccctgtcaaggactatgtccaggccaacccaggctggtactgggcatcctatgctgtgttctttgcaacctacctgaccctggcttgctgttctggacccaggaggcatttcccctggaacctgattctcctgaccgtctttaccctgtccatggcctacctcactgggatgctgtccagctactacaacaccacctccgtgctgctgtgcctgggcatcacggcccttgtctgcctctcagtcaccgtcttcagcttccagaccaagttcgacttcacctcctgccagggcgtgctcttcgtgcttctcatgactcttttcttcagcggactcatcctggccatcctcctacccttccaatatgtgccctggctccatgcagtttatgcagcactgggagcgggtgtatttacattgttcctggcacttgacacccagttgctgatgggtaaccgacgccactcgctgagccctgaggagtatatttttggagccctcaacatttacctagacatcatctatatcttcaccttcttcctgcagctttttggcactaaccgagaatgaggagccctccctgccccaccgtcctccagagaatgcgcccctcctggttccctgtccctcccctgcgctcctgcgagaccagatataaaactagctgccaacccagcctgtggccaggtcactgtctaccccagcccagcccagccctctgccgcttgtacatacgccatggggaccctgaggaactgaggccacgtcaatccctgtgccgccccattcgcccgttacatcttccaaactgggacggtcaaggctgaaggctcctctgggtttgagggtccaagggacaaggaggagaagcctagcaggatttcagatgcaggagagagacccaggaagcccggcagagccctgagccccactgcaattcctcctagggctgcacaatcatgtggccttagggcacactgtcctgcatccagtctgtgtcctcctgtctttctcatccaggtcaggcattgacactttgtaagaaagggggtaggggacacagctgggcaggtggagtgggtgggcaggatggctgtcccagtctgcccatcttctcttggctctgggaccagcggcttgttctagggatttggacctggaggccaagggcaataggagagggtctgaagcctgtgctgtctgctgcttgctgtgaatggccctcccgggtcatgacagagctcttttggggcaggaggtgagggcagggggccccgctccttggtaagggcctgccctggggctcccagggaagtgggagctggggagccaatccacccagacccgcgtccacctgggaggcatttggggttgcaggaccgagacccacatcctctcactcacttctccacccgccaggcagctgccacaggcctaaggctgagtgaggtgtgattgggccctccggctggatgttctgggggaggaggcaatcgctgtagctgccaggccagccccatctggaaggagtccctgctctgcctcagccctaacccgaggctgtgtgggagtcccttctgcacctcttatttcctaaacccttcctgtcagctgctgtttgctggctcgtccccagccaggcctcctgaggtcttcatagttggcacagtccacatctcttctagcttcactggccactcactcagcccagagtccctaagtgctcccccacttatctctgcatctctccaatttggaagccatccagctgatgctaacagccagggccagtccctccagctggtcccatgtaatgaggccagggctccttatcagcttccaggcggctgggatctcaggcagggtgtgcgtcagccctccaacccccagaggggcgcctgtggggagggaaccaggaggccacactgggggagcgtgcagccagcatgtgcagtggccaactccaggccagtggaaagttactgtgtggatacaggaaggctctgagtggctagcaggaccctcccttggcttcgccctcctcctcttctctctcccctgtgctgggagctccgtctgccttgggaagggagacgaggtgtgctgttccttcccagccccatccctccccacccttcctactcccagctttcaagaaacattgcagaagcatttgaagttttgttccatcttggatatttgaagagaaaaggagccaagaactggcgggtggtgtgtgtgcagcaaaggcattgggggcacgggtgagatgcccactgtgtgctggtctaaattaatccatcgcagtgatcctccagagacagcgctctgctcatgtccgtagcagagggaaaagccgaggtgctcagaaaggctcggtaatgagtcccaggtcatacggctagcgagtggcgggcctggggttcagacccacagctgcctcaagcaaacagggtatcacgcttgcccctgggcctgggtgggggccggaatgagaccacatgagagcgcagagaggtgggtggtcaggccctgatgtcctggggatttcttgtcctcagtgccacccggcctcccgtctttcctgaaacccctcgccagattttgcactctgaggtttctatcttccagacaagagctgggaggcaagatttctggtttctggttcctagcctcactgccagcgggctcctgctattaggtgagggtttcttgctgtctggaattcagtttttccatctgccacatggaagttcatagccaggatagggcgggagaggcaccagaacatttctctccactgactttctcacccggttcccaccctcctccacctcctctcctccgggcccctcagtttcctctcctcatctctggcctcagttccagagggttagccccagcaccccactctcctgccactgtcagatagccttggtcatgcttcctagaatctacttgtccaagttctcctctccctgggataagttactgcagaaactggggatttagaagcttattcagggctgagtgccaaaagcttgggggaggagggacaggtcctcggcaataaacagtgtcacacacgcatcacagccatttgagaaatggcttctttgcagagctggggaagccgggcagaagatgccgcagcctcctactctgggtcctgagggggggtggcaggtaccacagtgtaggcagcagggtcagggccaaagtctatgcgttccatctccaatccaggcagtgaggaatcctgaaacaccaggagaggcgtcagaagtaggaagggcaggggaacaggaatgcaagattaaggaaaccgcagctgagcaggtgtcacaagctgtaaaggaggaagggagtctgcaggcccttcacatttttggcctgggtggggctgggcccaggaaggggtgggctggattttgtaaagctggaggcagccaggaatctgactgtccggaatgtgagttgaggggtctcccactgaagtcctcttctggaagctgcagatgggggcccgggaggcacacacgagtctgggactcattcccgggcacacctatggctccttcggtatcacctggggaagccccggaatcttagttcttccattccctactcttccttccgagggagtcaggatgggacagacacccattttccaaaaggctccttgcctccttccctggcccacctgaagccaagtcccaggtgtcctggctgctctcctgggcggggtgggatttttgcataagcactttgctgccctccagtggctgcttgaggaaacgcagggcctggtttgggagagtcaccgagggcccatgtggctggaggttgggggcaggatctggcccgagctctcctcagacctccccagacctgtcttctcatcagccaccgctgttttcttttgccgaacgatggttgcatctctcggacacagtgtaccccctcccaagccctccctgagccgttctcctgagtccctgagggcagacacagctccagggacccaggccagctgccacacccccgacactcctgctgtccactggccttagctcctgcaagttccccagtgtccgcacctgttcccttccctgacctcaccttcctggggtctgtgactgactggagataaaaataaaagcaattgtgacacctg

SEQ ID NO: 150 - DNA, 3107 bp, Homo Sapiens
gccagctgctgtagaagaggggaggaaacaagccagtgcaaggggagcaaaagagaaaaggagccaggctgggcttcctgatcccacagcatcgcagagctcgggaggcacagctcacagacacaggaaacacaggactgctattctgctctcctgcccacggtgatctggtgccagctggtggaacagtgggtgatggcgtccctgctgcaagaccagctgaccactgatcaggacttgctgctgatgcaggaaggcatgccgatgcgcaaggtgaggtccaaaagctggaagaagctaagatacttcagacttcagaatgacggcatgacagtctggcatgcacggcaggccaggggcagtgccaagcccagcttctcaatctctgatgtggagacaatacgtaatggccatgattccgagttgctgcgtagcctggcagaggagctccccctggagcagggcttcaccattgtcttccatggccgccgctccaacctggacctgatggccaacagtgttgaggaggcccagatatggatgcgagggctccagctgttggtggatcttgtcaccagcatggaccatcaggagcgcctggaccaatggctgagcgattggtttcaacgtggagacaaaaatcaggatggtaagatgagtttccaagaagttcagcggttattgcacctaatgaatgtggaaatggaccaagaatatgccttcagtctttttcaggcagcagacacgtcccagtctggaaccctggaaggagaagaattcgtacagttctataaggcattgactaaacgtgctgaggtgcaggaactgtttgaaagtttttcagctgatgggcagaagctgactctgctggaatttttggatttcctccaagaggagcagaaggagagagactgcacctctgagcttgctctggaactcattgaccgctatgaaccttcagacagtggcaaactgcggcatgtgctgagtatggatggcttcctcagctacctctgctctaaggatggagacatcttcaacccagcctgcctccccatctatcaggatatgactcaacccctgaaccactacttcatctgctcttctcataacacctacctagtgggggaccagctttgcggccagagcagcgtcgagggatatatacgggccctgaagcgggggtgccgctgcgtggaggtggatgtatgggatggacctagcggggaacctgtcgtttaccacggacacaccctgacctcccgcatcctgttcaaagatgtcgtggccacagtagcacagtatgccttccagacatcagactacccagtcatcttgtccctggagacccactgcagctgggagcagcagcagaccatggcccgtcatctgactgagatcctgggggagcagctgctgagcaccaccttggatggggtgctgcccactcagctgccctcgcctgaggagcttcggaggaagatcctggtgaaggggaagaagttaacacttgaggaagacctggaatatgaggaagaggaagcagaacctgagttggaagagtcagaattggcgctggagtcccagtttgagactgagcctgagccccaggagcagaaccttcagaataaggacaaaaagaagaaatccaagcccatcttgtgtccagccctctcttccctggttatctacttgaagtctgtctcattccgcagcttcacacattcaaaggagcactaccacttctacgagatatcatctttctctgaaaccaaggccaagcgcctcatcaaggaggctggcaatgagtttgtgcagcacaatacttggcagttaagccgtgtgtatcccagcggcctgaggacagactcttccaactacaacccccaggaactctggaatgcaggctgccagatggtggccatgaatatgcagactgcagggcttgaaatggacatctgtgatgggcatttccgccagaatggcggctgtggctatgtgctgaagccagacttcctgcgtgatatccagagttctttccaccctgagaagcccatcagccctttcaaagcccagactctcttaatccaggtgatcagcggtcagcaactccccaaagtggacaagaccaaagaggggtccattgtggatccactggtgaaagtgcagatctttggcgttcgtctagacacagcacggcaggagaccaactatgtggagaacaatggttttaatccatactgggggcagacactatgtttccgggtgctggtgcctgaacttgccatgctgcgttttgtggtaatggattatgactggaaatcccgaaatgactttattggtcagtacaccctgccttggacctgcatgcaacaaggttaccgccacattcacctgctgtccaaagatggcatcagcctccgcccagcttccatctttgtgtatatctgcatccaggaaggcctggagggggatgagtcctgaggtgggcatttcacgggaagggttggtatgctggctttagacggggagaaacatctggaaggatgctcgagagaacaaatggaggtggtgaaaatcaagctttggattgtgcattcctaggcacaaaattacctcattcttcctaacaagcaatctgggacctgattttccaccttttttctcttttcttcccttcctttgttttcataagcctttggtatctttcctgcccttttcctttgtgtactctatactggagttcccttcttcctcttgctgtaggctcaatcccataccgacatctacaactaatctttcccatcaactctgtgtgaaggcaggttgcaactagaaattcagaggggcttggaatagagaaacctaaagaagcatcatcccctccatccccaacttcctcaaagcccaaagccaagggaaggataaatcaaggctcaaggcttccccagcaaagattagggaaagagacttgaccccaggactgtactacgactcttaagagaacactgcacagcactcaaagtcccccactggactgcttcctccttagccccactggtataaatacatctctctccaatttggcaaaaaaaaaaaaaaaaaaa

SEQ ID NO: 151 - DNA, 4121 bp, Homo Sapiens
ctgcgcctcgggggtcggcgtccaggctcggagcgcggcacggagacggcggcagcgctggactaggtggcaggccctgcatcatggaaactctttctaatgcaagtggtacttttgccatacgccttttaaagatactgtgtcaagataacccttcgcacaacgtgttctgttctcctgtgagcatctcctctgccctggccatggttctcctaggggcaaagggaaacaccgcaacccagatggcccaggcactgtctttaaacacagaggaagacattcatcgggctttccagtcgcttctcactgaagtgaacaaggctggcacacagtacctgctgagaacggccaacaggctctttggagagaaaacttgtcagttcctctcaacgtttaaggaatcctgtcttcaattctaccatgctgagctgaaggagctttcctttatcagagctgcagaagagtccaggaaacacatcaacacctgggtctcaaaaaagaccgaaggtaaaattgaagagttgttgccgggtagctcaattgatgcagaaaccaggctggttcttgtcaatgccatctacttcaaaggaaagtggaatgaaccgtttgacgaaacatacacaagggaaatgccctttaaaataaaccaggaggagcaaaggccagtgcagatgatgtatcaggaggccacgtttaagctcgcccacgtgggcgaggtgcgcgcgcagctgctggagctgccctacgccaggaaggagctgagcctgctggtgctgctgcctgacgacggcgtggagctcagcacggtggaaaaaagtctcacttttgagaaactcacagcctggaccaagccagactgtatgaagagtactgaggttgaagttctccttccaaaatttaaactacaagaggattatgacatggaatctgtgcttcggcatttgggaattgttgatgccttccaacagggcaaggctgacttgtcggcaatgtcagcggagagagacctgtgtctgtccaagttcgtgcacaagagttttgtggaggtgaatgaagaaggcaccgaggcagcggcagcgtcgagctgctttgtagttgcagagtgctgcatggaatctggccccaggttctgtgctgaccaccctttccttttcttcatcaggcacaacagagccaacagcattctgttctgtggcaggttctcatcgccataaagggtgcacttaccgtgcactcggccatttccctcttcctgtgtccccagatccccactacagctccaagaggatgggcctagaaagccaagtgcaaagatgagggcagattccttacctgtctgccctcatgatttgccagcatgaattcatgatgctccacactcgcttatgctacttaatcagaatcttgagaaaatagaccataatgattccctgttgtattaaaattgcagtccaaatcccataggatggcaagcaaagttcttctagaattccacatgcaattcactctggcgaccctgtgctttcctgacactgcgaatacattccttaacccgctgcctcagtggtaataaatggtgctagatattgctactattttatagatttcctggtgcttagccttataaaaaaggttgtaaaatgtacatttatattttatcttttttttttttttttttctgagacgcagtctggctctctgtcgcccaggctggagtgcagtggctcgatctctgctcactgcaagctccgcctcccgggttcacgccattctcctgcctcagcctcccgagtagctgggactacaggcgcccgccaccacgcccggctaattttttgtatttttagtagagacggggtttcaccgtgttagccaggatggtgtcgatctcctgacctcgtgatccacccgcctcggcctcccaaagtgctgggattacaggcttgagccaccgcgcccggctatattttatcttttatctttttctttgacatttaccaatcaccaagcatgcaccaaacactgctttaggcactggggacacaaaggggacagagccatcctcctttgacacctggtcttcagttctgtgcccaacgtatatagttttgacaatgaccaggttggactgtttaatgtctttcaacttaccacgtaatcctcttgtagggatcacatctttctttatgatattgtatttctctacctctaacagtaaaaattccattcaacccttaaagctcacttcaaattcttctttgagaagtttttcctttctccgcaaccagatgtacatatttgaactctctttgtacttggagggcacttctttcgtggtagttcttttatttttattaatctctgtatccttagatagtcctccaacaaccaaaggttgggactctgtcttacatatctgggtgcccctcatagtgcagtaataagtaagttgattatatacgagctatgtaacttatattttttaatggttggatatcactgagtttttttttttaagaatttttttattgaggtaaacttcacataacataaaattaactattttaaagtgagaagttcagtgccacttagtattgttaacaatgttgcataaccaccacctttatttaaagttccaaaaaaaatgttctcctctaaaaggaaaccccatcccattaagcagatactctccattccttccttcctccagcccccagcaaccaccaatctgctttctgtctctatggttttatctattcttgctattttatataaatcgaattgtatgagaccttttgtgtctggcttctttcacttagtacaagtttttgagatttatttacatagtagcatgtatcaacacttcatttttatggccaaataaaattgtattatgtgtttatagcacaatttatttatccactcattcattgatggactttgggttgtttctgacttttggctattgggaatagtgctgctatgaatgtttgtgtacctgtatttgtttgaatgcctattttgcattctcttgggtatatatctaggagtggaactgctgggtcatatgttaattctatgtttagctttttgaggaacagacaaactgttttccacagcagttgaaccattccacattcccaccagcaatgtatgagaattccaatttctgtccacttcctcaccaacacttattattttccttttcctttttttaaaaaaaataagttatggccatcttagtgggtgtgaagtggtatctcattgtgttttttatttgcatttcctatgtaatgagctagaaactaaagtacaaactagatgggacatccagtccctttgatagataatgctgagtaaaaaatgagatgaaagacatttgtttgtttttagaacatgagtgacagtttgttaaaaagctttagaggaggaatgaaaacaaagtgaagtacacttagaaaagggccaagtggacatcttggatgtcaagtgcctagttcagtatcttttttttttttttttttttttttgagacagtgcctcactctgtcacccaggctggagtgtagtggcatgatctgggctcactgcaacctcctcctcctggattcaagcaattctcttgcttcagcctcccaagtagctgagactacaagcacccaccaccacacccggctaattttgtatttttcagtagagacggggtttcgccacattggccgtgttggtcttgaactcctggcctcaagcaatccgcctacctcagcctcccaaagtgctaggattacaggcataagccactgagcccagccctagttcagtatcttttatgtaaattataaacatctgcaacattatgtatcatatgcagatacttattgcatttcttttattagtggtgaaagtgttctatgcatttattggctcttgaatttcctcatctatgaattgtcattcacacacctacttttctgcttcgtttttacatatgtctttgcctattaaagatattatccctctgttttatattttctctcattcttgtattgccttttaaattttgttatgatgtttcattaataaacagtgttttgttttcctctataaaaaaaaaaaaaaaa

SEQ ID NO: 152 - DNA, 3058 bp, Homo Sapiens
ggcagaagaggaagatttctgaagagtgcagctgcctgaaccgagccctgccgaacagctgagaattgcactgcaaccatgagtgagaacaataagaattccttggagagcagcctacggcaactaaaatgccatttcacctggaacttgatggagggagaaaactccttggatgattttgaagacaaagtattttaccggactgagtttcagaatcgtgaattcaaagccacaatgtgcaacctactggcctatctaaagcacctcaaagggcaaaacgaggcagccctggaatgcttacgtaaagctgaagagttaatccagcaagagcatgctgaccaggcagaaatcagaagtctggtcacctggggaaactatgcctgggtctactatcacatgggccgactctcagacgttcagatttatgtagacaaggtgagacatgtctgtgagaagttttccagtccctatagaattgagagtccagagcttgactgtgaggaagggtggacacggttaaagtgtggaggaaaccaaaatgaaagagcgaaggtgtgctttgagaaggctctggaaaagaagccaaagaacccagaattcacctctggactggcaatagcaagctaccgtctggacaactggccaccatctcagaacgccattgaccctctgaggcaagccattcggctgaatcctgacaaccagtaccttaaagtcctcctggctctgaagcttcataagatgcgtgaagaaggtgaagaggaaggtgaaggagagaagttagttgaagaagccttggagaaagccccaggtgtaacagatgtacttcgcagtgcagccaagttttatcgaagaaaagatgagccagacaaagcgattgaactgcttaaaaaggctttagaatacataccaaacaatgcctacctgcattgccaaattgggtgctgctatagggcaaaagtcttccaagtaatgaatctaagagagaatggaatgtatgggaaaagaaagttactggaactaataggacacgctgtggctcatctgaagaaagctgatgaggccaatgataatctcttccgtgtctgttccattcttgccagcctccatgctctagcagatcagtatgaagaagcagagtattacttccaaaaggaattcagtaaagagcttactcctgtagcgaaacaactgctccatctgcggtatggcaactttcagctgtaccaaatgaagtgtgaagacaaggccatccaccactttatagagggtgtaaaaataaaccagaaatcaagggagaaagaaaagatgaaagacaaactgcaaaaaattgccaaaatgcgactttctaaaaatggagcagattctgaggctttgcatgtcttggcattccttcaggagctgaatgaaaaaatgcaacaagcagatgaagactctgagaggggtttggagtctggaagcctcatcccttcagcatcaagctggaatggggaatggagaatagagatgtggtgcccactaggctactgctgatagggagctgaaattcctccaccaagttggtattcaaaatatgtaatgactggtatggcaaaagattggactaagacactggccataccactggacagggttatgttaacacctgaattgctgggtcttgagagagcccaaggagttctgggagagggaccagattggggggtaggtccacgggcttggtgatagaattatttctcgattgacttcttgagtgcaatttgaactgtaacatttgcttagtcacctttagtggagtaatccactgggcttgtttctatatttatataaagcagccaaatccttcatgtaatattgaagtccatttttgcaatgttgttccatacttggagtcattttgcatcccatagaggttagtcctgcatagccagtaatgtgctaagttcatccaaaagctgggggaccaaagtctaaatagggctcagtatcccccatcgcttatctctgcctccttcctcctccttcccagtctatcatcaaccttgagtattctacacaatgtgaattcaagtgcctgattaattgaggtggcaacatagtttgagacgagggcagagaacaggaagatacatagctagaagcgacgggtacaaaaagcaatgtgtacaagaagactttcagcaagtatacagagagttcacctctactctgccctcctcatagtcataatgtagcaagtaaagaatgagaatggattctgtacaatacactagaaaccaacataatgtatttctttaaaacctgtgtgaaaaaataaatgttccaccagtagggataggggaaaagtaaccaaaagagagaaagagaaaggaatgctggtttatctttgtagattgtaatcgaatggagaaatttgcagtattttagccactattaggaattttttttttttgtaaaatgaagactgaactctgttcaaatgctttcatgaacctggtttgagacggtaggaaagcaacaaaacgtgggaacctggtgactaagggcctggtgcaaggacttgggaaatgtcattaataatagatggtggggttttcccccctttagaaatgttggatattaagtgatataaacacttcttttaactccgaaaatcttctgagaaatcacaaaattcacggtatgcttggaacgattgagattttctaggtagatgctgaatagcctagacatcaaagttggtgtgaaccaaaatagagtcagctgacccagcatcagccacactctgggttggaaaatgtttgcctgttggaattaatttaagcttaagtatatatcaacattattttattgtgcaattaaaacaatacaaattcatggttttttaaagttaaaaattctaaccactgtaacaacagtttttgtgttattttctgtattaaacatcttgttgcacgcatttgaggtcatcagggtgcaaaatttgtattcctgaaaatgtcatatattttcattaataaataacctaaatatgataaaacataaaaaaaaaaaaaaa

SEQ ID NO: 153 - DNA, 1810 bp, Homo Sapiens
gaaggccctgccgggcggcggcggcggcgacagcgtgcgagccatggtcgcgctggagaaccccgagtgcggcccggaggcggcggagggcaccccgggcgggcggcggctgctgccccttcccagctgcctgcctgccctagccagctcccaggtgaagagactctcggcttccaggcggaaacagcacttcatcaaccaggcagtgcggaactcagacctcgtgcccaaggccaaggggcggaagagcctccagcgcctggagaacacccagtacctcctgaccctgctggagacagacgggggcctgcctggcctggaggatggggacttggcaccccctgcatcaccaggcatctttgccgaggcctgcaacaacgccacctatgtggaggtctggaacgatttcatgaaccgctccggggaggagcaggagcgggttcttcgctacctggaggatgagggcaggagcaaggcgcggaggaggggccctggccgtggggaggaccggaggagagaggaccccgcctatacaccccgcgagtgcttccagcgcatcagccggcgtctgcgagccgtcctcaagcgcagccgcatccccatggaaacgctggagacctgggaggagcggctgcttcggttcttctccgtgtccccccaggccgtgtacacagcaatgctagacaacagcttcgagaggcttctgctgcacgctgtctgccagtacatggacctcatctcggccagtgctgacctggaggggaagcggcagatgaaggtcagtaatcggcacctggatttcctgccgccggggctgctcctgtccgcctacctggagcagcacagctgatggcggccccgcggagaccccgctgccacctcgcccagccatcaagccctccgataccttcggctaaaatatctttcatatttttagaatttgtcctcggaaacctttttcgcttggggtggtctctctcactctgccccctcctcacgcagctcttggcagtcaacagacgctggcggctggggctgcccatgccatcccagctccaagcttcccactccgggacttgtgtttgggtggggagacctgacctgggcatgttcctgtttcttcatcgttgagcttttctggcccggtctgaagctcaagtgaggagggggaggctgggtttttatcacttttaatgaatttggtgtgatttgttgtagatttttaaatttcccttttggagagaaaaaccaaaaaaactcgccccactggtaaaacatgggtcttggtcccagcccctgctcagcccctcccagtttttagcttgaatgagggtggggtctctgggaccctgcccctcatgccagaagcatcttgtgttgtatatgtgtgcgcgcgtgtgccctgagacccaggacagaagccacggtcctaagagccggttttatcctcgtcattctgcgtgtcctcccccacgccacctgtgtcggggctcagggtctcctgctttatatgagcccccttcctttcctcccctcctttatgctgggggtccaggacttccagccagaagcctctgcccttgcactaccttgtctgtcaccccatcccgtgtcccctcgtcccccagcctgactcctgcctgatagctcctgtgtccccatgctggtcctcctggcccaggctgcaggagccaggctggggggcctccgcacccccttgctgcgtgtgggtaattgtgttttgggggaaagtggggaatttaataaatttctggtgctctggcaaaaaaaaaaaaaaaaaaaaaaaaaa

SEQ ID NO: 154 - DNA, 2563 bp, Homo Sapiens
ggcgctgccgggtctcggttcgggttcgttgccccggtgccgggaccgggccggtctctccggccgccccagccgggcgcagcagccggaggtgtcgggaccctctggacccaccctagcgggccccgccggcggtcggcctccggtccgggctcccagtcgcgccgtcctcgccgccccatggagtcccagtgcgactactcgatgtacttcccggccgtgccgctgccgccgcgcgcggagctggcaggggatccgggccggtaccgggcgctgccccggcgcaaccatctgtacttgggggagactgtccgttttctgctggtgttgcgctgccggggcggtgcggggtccggcaccgggggcggcccgggcttgggctccagaggagcctgggcagaactggcaaccgccctggccgccctggcctcggtcagcgccggaggcgggatgccggggggcggcggcgccggcgaccaggattcggagcccccagggggaggggatcctgggggtgggggtttgttccgaggctgcagcccccttctcacccacggcccgggccctgctacctcagggggagcgaccacgctgcctgtggaggaaccgattgtgtccacagatgaggtcatcttcccactcaccgtttcactggatagactgcccccagggacacctaaggccaagattgtagtgactgtgtggaagcgggagattgaggcaccagaggtcagagatcaaggctacctgcgattgctgcagacccgatctcctggggagacattccggggcgagcagagcgctttcaaggcccaagtgagcacgctgctgactctgctgccccctccggttctgagatgccggcagttcactgtggctggaaaacacttgaccgtgctcaaggtgctgaacagctcctctcaggaggaaatctccatctgggatatccgaatcctccccaacttcaacgccagttatctacctgtcatgcccgatggctctgtgctgctggtggacaatgtctgtcaccagtctggggaagtctccatgggctccttctgccgcctacccgggacctctggctgcttcccctgcccgctgaatgccctggaggaacacaacttcctgtttcagctgagagggggtgagcagccccctccaggggccaaggagggcctggaagttcccctgattgctgtggttcagtggtctaccccaaagctgcccttcactcagagcatctacacccactaccgcctgcccagtgtccgcttggaccgcccgtgttttgtgatgaccgcttcttgtaagtcccctgttcggacctacgagcgtttcactgtcacctacacgctgcttaacaatctccaagacttccttgctgtgaggctcgtgtggaccccagagcatgcacaggctggaaagcagctgtgtgaggaggagcgccgggccatgcaggctgccctggactccgtcgtctgccacacgcccctcaacaaccttggcttttcccggaagggcagcgcgctcaccttcagtgtggccttccaggctctgaggacggggctcttcgagctaagccagcacatgaaactgaagctgcagttcaccgccagcgtgtcccaccctccacccgaggcccggcccctctcccgcaagagcagccccagcagccctgctgtccgggacttggtggagaggcatcaggctagcctgggccgctcccagtccttctcccaccagcagccttcccgaagccacctcatgaggtcgggcagtgtgatggagcgcagagccatcacgccccctgtggcctctcctgttggccgccccctctacctgcccccggacaaggctgtgttgtctctggacaagattgccaagcgcgagtgcaaggtcctggtggtggaacccgtcaagtagcaccgtgccagctctgttccctcttacactccagagacccaacgcccccagaggggatccctgctcctgggctgtgcctcccctgggatgcctcccagacgggggtgaagaggcctggcagagctgcctgtcttgtgtctgctgatgagggatgggggaagaagctgtgaagtgggcgggcatggctgggactaagccaccagtattccccgagttcctgtggggggggctggccccacccctaggccagggcaagggttcccagagctcccttgtccccggccctttaccctggttctgagtttacaaagtctcttcctcattcccgttgagttctttcccacctctgacattccctccctccctcccgcagggctgagattagagggtggtgatggctaagggcccctgacagtgaccttcctgtctcaggggttggggacagggccaggtagcctcctgccccttatgtttacgtttgcagcctgaagcactttaatttttttttttttggtctgttcctgtaacttattttccaactattgcttccaactgaaataagactattaaatgcctgttcaggagggagaaaaaaaaaaaaaaaaaaaaaaaaaaaaaaaaaaaaaaaaaaaaaaaaaaa

SEQ ID NO: 155 - DNA, 2756 bp, Homo Sapiens
gaaagggagtgttcgggtttcgctggggcctcgcggctccagagcccagcatggcttcctcgcgagcctcttccacgcaggcaaccaaaactaaagcacccgacgacttagttgctccggtcgtgaagaaaccacacatctattatggaagtttggaagagaaggagagggagcgtctggccaaaggagagtctgggattttggggaaagacggacttaaagcagggatcgaagctggaaatattaatataacctctggagaagtgtttgaaattgaagagcatatcagcgagcgacaggcagaagtattggctgagtttgagagaaggaagcgagcccggcagatcaatgtttccacagatgactcagaggtcaaagcttgccttagagccttgggggaacccatcacactttttggagagggtcctgctgaaagaagagaaaggttaagaaatatcctctcagttgtcggtactgatgccttgaaaaagaccaaaaaggatgatgagaagtctaaaaagtccaaagaagagtatcagcaaacctggtatcatgaaggaccaaatagcttgaaggtggcaagactatggattgctaattattcgttgcccagggcaatgaaacgcttggaagaggcccgactccataaggagattcctgagacaacaaggacctcccagatgcaagagctgcacaagtctctccggtctttgaataatttttgcagtcagattggggatgatcggcctatctcctactgtcactttagtcccaattccaagatgctggccacagcttgttggagtgggctttgcaagctctggtctgttcctgattgcaacctccttcacactcttcgagggcataacacaaatgtaggagcaattgtattccatcccaaatccactgtctccttggacccaaaagatgtcaacctggcctcttgtgcggctgatggctctgtgaagctttggagtctcgacagtgatgaaccagtggcagatattgaaggccatacagtgcgtgtggcgcgggtaatgtggcatccttcaggacgtttcctgggcaccacctgctatgaccgttcatggcgcttatgggatttggaggctcaagaggagatcctgcatcaggaaggccatagcatgggtgtgtatgacattgccttccatcaagatggctctttggctggcactgggggactggatgcatttggtcgagtttgggacctacgcacaggacgttgtatcatgttcttagaaggccacctgaaagaaatctatggaataaatttctcccccaatggctatcacattgcaaccggcagtggtgacaacacctgcaaagtgtgggacctccgacagcggcgttgcgtctacaccatccctgctcatcagaacttagtgactggtgtcaagtttgagcctatccatgggaacttcttgcttactggtgcctatgataacacagccaagatctggacgcacccaggctggtccccgctgaagactctggctggccacgaaggcaaagtgatgggcctagatatttcttccgatgggcagctcatagccacttgctcatatgacaggaccttcaagctgtggatggctgaatagatgacaatgggaaaaggacttgaacctcaagctctctctaaggagctgttttcctcaaacgagaagaattgaagtgtttagttctatcatgttttctgccaattaccatgcatagaccctcagtagaattggatttccatgtcagcccccactccaggaaggcagcccaatccctaggtgatggggaacccctctcacggttgaaaatttattacctttttacgccctgccacgaactgtgtagacattgtttttattaatcttttgtttggccgggcgtggtggctcacgcctgtaatcctagcactttgggaggccgaggtgggtagatcgcttgagctcaggagttcaagacgagcctgggcaacatggcaaatgccgtctctgcaaaaaaatactaaaattagctggtcgcggtggcttctgcctgtgattccggctacttgggaggctgaggtgggagggattgcttaagcctgggaggcagaggttgcagtgagccgagattgcgccattgcactctagcctgtgtgacagagcaagaccctgtctcaaaaaaaaaaaaaatttgttcgaatgccttatagccttcctcacagcacccaggattgtgactgactctgcatttttaattcttgaaacttggctttccataacatggtacatgcttcaggactacatatgacccagagagcaaggtggctgaactatagtctggaagccctcaggtaaagaggcacatctcaccactcattggttaaacaatgcatcatagcgagcacttttcctttccctggagaatgggatgtgaagcagtagaccgcagccacgccgatggttatacagtgaagaagacttcacctcttcctattgagtttgcttggaatgctgacagcatcaggcaactctgaactgaacatttgctttgtcagaaaatatctttttttttactttgaagtttggcaaccttcatgttaccccaaagcaaaaccattgtgtcaggagtcaaacaaatgtttagaaagcaaacatgacgtctctattgtacaacctcctttctcttggctgtttaaaggatgtacttcgtgtattaaagggtactttatgttgaagtaaaaaaaaaaaaaaaaaaaaaaa

SEQ ID NO: 156 - DNA, 2246 bp, Homo Sapiens
agttcccgttaaccttagccacaaagtcaaagatggcaggaaagggacacagccggcgctgatgctgggaggcctccagggatggagagtggcctggctggcaacggcacaggagctgggctggtgatgaaggtcaagcaggagaagccggagcggctgctgcagacgctggcgccgcaggccatgcttgtggagaaggacaaggagaacatctttcagcagcaccggggcctcccgccacgccagaccatggggcggcctcgagccctggggggacaggaggagtctgggagtccaaggtgggcccctcccactgagcaggatgcggggctggcaggccgggctcccgggtcagcctccggccccctgagcccctcgctttcctccggcgagggtcactttgtatgcctggactgcgggaagaggttcagctggtggtcgtccctgaagatccaccagcgcacccacaccggggagaagccgtacctctgcggcaagtgcggcaagagcttcagccagaagccgaacctggcgcgccaccagcggcaccacacgggcgagcgacccttctgctgccccgagtgcgcgcggcgcttcagccagaagcagcacctgctcaagcaccagaagacccactcccggcccgccacccactcgtgccccgagtgcgagcgctgcttccgtcaccaggtgggcctccgcatccaccagcgcgcgcacgcccgggaccgccagggctcccgcgccggcctgcacgagctgattcaggacgcggcggcgcgccgggcctgtcgcctgcagccggggccgccgcgggggcgccccgagtgggcctggctggggctctgccagggctggtggggccagcccggggcccgggccgcggtctccggcccccgaggggccgggcgagccgcgccagttcatctgcaacgagtgtggcaagagcttcacctggtggtcgtcgctgaacatccaccagcgcatccacactggcgagcgcccctatgcgtgccccgagtgcggccgccgcttcagccagaagcccaacttgacgcggcacctgcgcaaccacacaggcgagcgcccgcacccctgcccgcactgtggccgcggcttccgccagaagcagcacctgctcaagcacctgcgcacgcacctgcccggcgcccaggctgcgccctgccccagctgcggtaagagctgccgcagccgcgccgcgctgcgcgcccaccagcgcgcccacgctgtcgctgagcccgccgttccggccggggaaccgggcgaccagccgcaggccgaggccatcccgggcttggccgcgaggccgcggagctcccaacggtccccgggggcccgggacgcgctgtggggccggggacaagcgggcctcgctgggcctggcgagccgcgccagttcatctgcaacgagtgcggcaagagcttctcgtggtggtcggcgctcaccatccaccagcgcatccacacgggtgagcggccctacccgtgccccgagtgcggccgccgcttcagccagaagcccaacctgacgcggcaccggcgcaaccacacaggcgagcggccctacctgtgtcccgcctgcggccgcggcttcagccagaagcagcacctgctcaagcaccagcgcgtgcaccgcgcggcccctgcgtgcagccccaaggaggaggcgcgctagtggactggacctcagcggacccgtggtggtgcgggggatgtttgcggggtgtgtgtggggagtgggggtggccaggattgctggctcctagaaccccttagagcgggaccggtggattccttaaggctctgaagggctgagaacagttctagaagcgtcccaaagggtgctgggaaaggtcccagcgtgggttgagggaggagggaagatccgagttcctcaccgcgggccgggatgtgaccaccctcttcagaggttggaccccaggcttcaagcaccgagtgaggggtctgttggggacgctgggagagtctctggtgtgaagtggcttaggtctggactggtcagctgtggcaccagccggtcctgcccacgcttcaggatggccgggggctgcccctgtgggagagttgccaagactcggcgataccaaggatggaagccagaggctgtggcgagggagagccaagcatattcccagcaccagggccactgctggcacgtcgtagacatccaataaatatttttggaaggaaaaaaaaaaaaaaaa

SEQ ID NO: 157 - DNA, 3351 bp, Homo Sapiens
ccggggtgccgggtccgcgcgcaccccaacaccccaccagctgggcctcggggcacatctccagacttcaatttggctgaaataattcatgccacggacctgtgcacatgcctggaattgagagacacagttaaaagactccaagttgctttctgccttttgaaaactcctgaaaaccatccctctggactctggaattctacacagctcaaccaagactttgcttgaatgtttacattttctgctcgctgtcctacatatcacaatatagtgttcacgttttgttaaaactttggggtgtcaggagttgagcttgctcagcaagccagcatggctaggatgagctttgttatagcagcttgccaattggtgctgggcctactaatgacttcattaaccgagtcttccatacagaatagtgagtgtccacaactttgcgtatgtgaaattcgtccctggtttaccccacagtcaacttacagagaagccaccactgttgattgcaatgacctccgcttaacaaggattcccagtaacctctctagtgacacacaagtgcttctcttacagagcaataacatcgcgaagactgtggatgagctgcagcagcttttcaacttgactgaactagatttctcccaaaacaactttactaacattaaggaggtcgggctggcaaacctaacccagctcacaacgctgcatttggaggaaaatcagattaccgagatgactgattactgtctacaagacctcagcaaccttcaagaactctacatcaaccacaaccaaattagcactatttctgctcatgcttttgcaggcttaaaaaatctattaaggctccacctgaactccaacaaattgaaagttattgatagtcgctggtttgattctacacccaacctggaaattctcatgatcggagaaaaccctgtgattggaattctggatatgaacttcaaacccctcgcaaatttgagaagcttagttttggcaggaatgtatctcactgatattcctggaaatgctttggtgggtctggatagccttgagagcctgtctttttatgataacaaactggttaaagtccctcaacttgccctgcaaaaagttccaagtttgaaattcttagacctcaacaaaaaccccattcacaaaatccaagaaggggacttcaaaaatatgcttcggttaaaagaactgggaatcaacaatatgggcgagctcgtttctgtcgaccgctatgccctggataacttgcctgaactcacaaagctggaagccaccaataaccctaaactctcttacatccaccgcttggctttccgaagtgtccctgctctggaaagcttgatgctgaacaacaatgccttgaatgccatttaccaaaagacagtcgaatccctccccaatctgcgtgagatcagtatccatagcaatcccctcaggtgtgactgtgtgatccactggattaactccaacaaaaccaacatccgcttcatggagcccctgtccatgttctgtgccatgccgcccgaatataaagggcaccaggtgaaggaagttttaatccaggattcgagtgaacagtgcctcccaatgatatctcacgacagcttcccaaatcgtttaaacgtggatatcggcacgacggttttcctagactgtcgagccatggctgagccagaacctgaaatttactgggtcactcccattggaaataagataactgtggaaaccctttcagataaatacaagctaagtagcgaaggtaccttggaaatatctaacatacaaattgaagactcaggaagatacacatgtgttgcccagaatgtccaaggggcagacactcgggtggcaacaattaaggttaacgggacccttctggatggtacccaggtgctaaaaatatacgtcaagcagacagaatcccattccatcttagtgtcctggaaagttaattccaatgtcatgacgtcaaacttaaaatggtcgtctgccaccatgaagattgataaccctcacataacatatactgccagggtcccagtcgatgtccatgaatacaacctaacgcatctgcagccttccacagattatgaagtgtgtctcacagtgtccaatattcatcagcagactcaaaagtcatgcgtaaatgtcacaaccaaaaatgccgccttcgcagtggacatctctgatcaagaaaccagtacagcccttgctgcagtaatggggtctatgtttgccgtcattagccttgcgtccattgctgtgtactttgccaaaagatttaagagaaaaaactaccaccactcattaaaaaagtatatgcaaaaaacctcttcaatcccactaaatgagctgtacccaccactcattaacctctgggaaggtgacagcgagaaagacaaagatggttctgcagacaccaagccaacccaggtcgacacatccagaagctattacatgtggtaactcagaggatattttgcttctggtagtaaggagcacaaagacgtttttgctttattctgcaaaagtgaacaagttgaagacttttgtatttttgactttgctagtttgtggcagagtggagaggacgggtggatatttcaaatttttttagtatagcgtatcgcaagggtttgacacggctgccagcgactctaggcttccagtctgtgtttggtttttattcttatcattattatgattgttattatattattattttattttagttgttgtgctaaactcaataatgctgttctaactacagtgctcaataaaatgattaatgacaggatggggttcccctgtgcttttaccagtagcatgaccccttctgaagccatccgtagaaagtactttgtcctccaaaaagctaacatacggttttgaagcagcattgaaacttttgtagcaatctggtctatagacttttaactcaagaagctaaggctagacttgttaccttcgttgaatgatgttagttgactgtactgtaatgttgtatcaactgaattgaatgtttgcctttaaacaatgaattttctttttctttccttttttttttttgttgtaatagttaaagaggcttagaacaagctaacaggcaatagaaatatgtatatcagattttttaatgtaacaaactacatgttaattgttatcttattctttttatctttagtagacacttttaaaagaaaagacaattttgttgtgtttaactcaccaacacgtggtgtataatgaagacagaactataataaattagttttgttctgattttttaaaaaaaaaaaaaaaaaaaaaaaaaaaaaaaagaaaaaaaaaaaaaaa

SEQ ID NO: 158 - DNA, 2449 bp, Homo Sapiens
cttgtccccagcgcctggactcccccttaactgcttgggaaatgtgacctttgctctggggggcctggccctgcaggccccaaccttccctcatctctggcggccctcttgggcctctgacccagcccctccccgggccaggctcacagaagctggcttctgggactgtcctgggcccaagtgggcacctgcgccagccccacctgtgcctgggctgtggccccttcctacagggcgctcaccatggccccgccgctcctgctgctgctgctggccagtggagcggccgcctgcccgctgccctgcgtctgccagaacctgtccgagtcgctcagcaccctctgtgcccaccgaggcctgctgtttgtgccgcccaacgtggaccggcgcacagtggagctgcggctggctgacaacttcatccaggccctggggccccctgacttccgcaacatgacgggactggtggacctgacactgtctcgcaatgccatcacccgcattggggcccgcgcctttggggacctcgagagcctgcgttccctccaccttgacggcaacaggctggtggagctgggcaccgggagcctccggggccccgtcaatctgcagcacctcatcctcagcggcaaccagctgggccgcatcgcgccgggagccttcgacgacttcctagagagcctggaggacctggacctgtcctacaacaacctccggcaggtgccctgggccggcatcggcgccatgcctgccctgcacaccctcaacctggaccataaccttattgacgcactgcccccaggcgccttcgcccagctcggtcagctctcccgcctggacctcacctccaaccgcctggccacgctggctccggacccgcttttctctcgtgggcgtgatgcagaggcctctcccgcccccctggtgctgagctttagcgggaaccccctgcactgcaactgtgagctgctgtggctgcggcggctggcgcggccggacgacctggaaacgtgcgcctccccgcccggcctggccggccgctacttctgggcagtgcccgagggcgagttctcctgtgagccgcccctcattgcccgccacacgcagcgcctctgggtgctggaaggccagcgggccacgctgcggtgccgggccctgggtgaccccgcgcctaccatgcactgggtcggtcctgacgaccggttggttggcaactcctcccgagcccgggctttccccaacgggaccttagagattggggtgaccggcgctggggacgctgggggctacacctgcatcgccaccaaccctgctggtgaggccacagcccgagtagaactgcgggtgctggccttgccccatggtgggaacagcagtgccgaggggggccgccccgggccctcggacatcgccgcctccgctcgcactgctgccgagggtgaggggacgctggagtctgagccagccgtgcaggtgacggaggtgaccgccacctcagggctggtgagctggggtcccgggcggccagccgacccagtgtggatgttccaaatccagtacaacagcagcgaagatgagaccctcatctaccggattgtcccagcctccagccaccacttcctgctgaagcacctcgtccccggcgctgactatgacctctgcctgctggccttgtcaccggccgctgggccctctgacctcacggccaccaggctgctgggctgtgcccatttctccacgctgccggcctcgcccctgtgccacgccctgcaggcccacgtgctgggcgggaccctgaccgtggccgtggggggtgtgctggtggctgccttactggtcttcactgtggccttgctggttcggggccggggggccggaaatggccgcctccccctcaagctcagccacgtccagtcccagaccaatggaggccccagccccacacccaaggcccacccgccgcggagccccccgccccggccgcagcgcagctgctctctggacctgggagatgccgggtgctacggttatgccaggcgcctgggaggagcttgggcccgacggagccactctgtgcatggggggctgctcggggcagggtgccggggggtaggaggcagcgccgagcggctggaagagagtgtggtgtgatggacgggcagcttcctgtgtgctccaagggatgagcctcgtggggcagagggcccggggccgccgcctggcctgggagtccctccctggtttttattctcagtacctcaggctcccctgtgtacttggaggggcagggagccctttcctcggttctggcctccagaccagggtaagggcaggcccctccaacaggtgctcacagccaccgaggcaggggctgcagccacccactgggagtcttgtttttatttataataaaattgttggggacacctcaaaaaaaaaaaaaaaaaaa

SEQ ID NO: 159 - DNA, 1483 bp, Homo Sapiens
gacacagtagaaataacactttataagcctcttcctcctcccatctcctggcctccttccatcctcctctgcccagactccgcccctcccagacggtcctcacttctcttttccctagactgcagccagcggagcccgcagccggcccgagccaggaacccaggtccggagcctcaacttcaggatgttgacaacattgctgccgatactgctgctgtctggctgggccttttgtagccaagacgcctcagatggcctccaaagacttcatatgctccagatctcctacttccgcgacccctatcacgtgtggtaccagggcaacgcgtcgctggggggacacctaacgcacgtgctggaaggcccagacaccaacaccacgatcattcagctgcagcccttgcaggagcccgagagctgggcgcgcacgcagagtggcctgcagtcctacctgctccagttccacggcctcgtgcgcctggtgcaccaggagcggaccttggcctttcctctgaccatccgctgcttcctgggctgtgagctgcctcccgagggctctagagcccatgtcttcttcgaagtggctgtgaatgggagctcctttgtgagtttccggccggagagagccttgtggcaggcagacacccaggtcacctccggagtggtcaccttcaccctgcagcagctcaatgcctacaaccgcactcggtatgaactgcgggaattcctggaggacacctgtgtgcagtatgtgcagaaacatatttccgcggaaaacacgaaagggagccaaacaagccgctcctacacttcgctggtcctgggcgtcctggtgggcagtttcatcattgctggtgtggctgtaggcatcttcctgtgcacaggtggacggcgatgttaattactctccagccccctcagaaggggctggattgatggaggctggcaagggaaagtttcagctcactgtgaagccagactccccaactgaaacaccagaaggtttggagtgacagctcctttcttctcccacatctgcccactgaagatttgagggaggggagatggagaggagaggtggacaaagtacttggtttgctaagaacctaagaacgtgtatgctttgctgaattagtctgataagtgaatgtttatctatctttgtggaaaacagataatggagttggggcaggaagcctatggcccatcctccaaagacagacagaatcacctgaggcgttcaaaagatataaccaaataaacaagtcatccacaatcaaaatacaacattcaatacttccaggtgtgtcagacttgggatgggacgctgatataatagggtagaaagaagtaacacgaagaagtggtggaaatgtaaaatccaagtcatatggcagtgatcaattattaatcaattaataatattaataaatttcttatatttaaggcaaaaaaaaaataaaaaaaaaaaaaaaaaaaaaaa

SEQ ID NO: 160 - DNA, 2617 bp, Homo Sapiens
ctcgctgcccaggcccccgacgccgcggcaggagccccccaagagcgcgggaagccccgtggacctggcgctcccggctcgggcgtggacggggcgggcgccggggcggggcgcgcgtcctcgcgggtctgaatggaagggtcgaggtcgtcgtcggcggcgagcagatcctgaagccagaactccaccccggcgcccgcgccatgcggcgggagaggtgcggcgccccccacccgcgtcgccgccatggaggtgctgcggcgctcctcggtcttcgccgccgagatcatggacgcctttgaccgctcgcccacagacaaggagctggtggcccaggccaaggcgctgggccgggagtacgtgcacgcgcggctgctgcgcgccggcctctcctggagcgcgcccgagcgtgccgcgccggtcccgggacgcctggctgaggtgtgcgcggtgctgctgcgcctgggcgatgagctggagatgatccggcccagcgtctaccgcaacgtggcgcgtcagctgcacatctccctgcagtctgagcctgtggtgaccgatgcgttcctggccgtggctggccacatcttctctgcaggcatcacgtggggcaaggtggtgtccctgtatgcggtggccgcggggctggccgtggactgtgtgaggcaggcccagcctgccatggtccacgccctcgtggactgcctgggggagttcgtgcgcaagaccctggcaacctggctgcggagacgcggcggatggactgatgtcctcaagtgtgtggtcagcacagaccctggcctccgctcccactggctggtggctgcactctgcagcttcggccgcttcctgaaggctgccttcttcgtgctgctgccagagagatgagctgcccacctggcagtggccgcagcctggccctctgggcccaacgcaggaggccctcagcacccgaacacatcttcctcctccccacccgagcctggagcactctaaccctcggagaccccctaagccccgttcctccgcagacccaggccctccggaaggggtgagtggggaggggctttcctgagcctggagctgggctttggggcagcctgcgaccctccccgcttgtgtcccttctcctgtgatctctgtgttttcccttttctttctggggccaggaagtcagggtcaactcccaggcctcagatgcaggggcccagaacacctgctctcacctgagccccaggtgaaggggcccgggaacacctgctctcacctgagccccaggtgaaggggcccgggaacacctgctctcacctgaaccccaggtgaaggggcccggaacacctgctctcacctgagccccaggtgaaggggcccggaacacctgctctcacctgagccccaggtgaaggggcccgggaacacctgctctcacctgagccccaggtgaaggggcccgggaacacctgctctcacctgaaccccaggtgaaggggcccagaacacctgctctcacctgagccccaggtgaaggggcccggaacacctgctctcacctgagccccaggtgaaggggcccgggaacacctgctctcacctgagcccctggtgaaggggcccggaacacttgctctcacctgagccccaggtgaaggggcccggaacacctgctctcacctgagcccccggtgaaggggcccggaacacttgctctcacctgagccccaggtgaaggggcccggaacacctcctctcacctgagccccaggtgaaggggcccggaacacctcctgtcacctgagccccaggtgaaggggcccgggaacacctctcacctgaacccgggggtcccatcccaggaagaagggccatctcaggacatgagtcctcaggggccctgcacattcaatctgaaggtgaccctggcctggctgaagctggaagagctgtggggactcagcctgtaaacagagcgtaaggttcacatgctggttgcttaatccgtttctggaggaagagtatgacacccacttgtgatggggtccttgtgcggtggggaccggggccggcgggctccaggccagcacacctaacccatggatgtggaacctacggccgagaaggaatgttgcatgagtcggatcccagtccattgtcagtggagggtgagggtgaccccatctgctatttttgtgctcatcctcatacaaccatttggggatgtgcctattagggctccgtaagaactcagatgcctgggaagcccagcccctcaggtgcccccacacacagccttcccttgacgcctacatttctaggcacatgtgaggcatctttcctggagccccgagccagccctgtccctccccagtgcagcatggcactcaggagatacaggctggacatggggcagtcgttctggggaggcctggcctagcagccacccacctgagccctcccggccaggcttcgtgctggggtgggccatgtgccaggacaggagggtcccggcggaaagccagccccggactcatcgtgacattgagatcccactggagggtaggggtggtaataaacttctccaaacgatcgttgtcattttagacagaaaaaaaaaaaaaaaaaa

SEQ ID NO: 161 - DNA, 2447 bp, Homo Sapiens
gcggccgctcagtctgggcgcttgcaggctgctaaacccaaccgcagttgactagcacctgctaccgcgcctttgcttcctggcgcacgcggagcctcctggagcctgccaccatcctgcctactacgtgctgccctgcgcccgcagccatgtgccgcaccctggccgccttccccaccacctgcctggagagagccaaagagttcaagacacgtctggggatctttcttcacaaatcagagctgggctgcgatactgggagtactggcaagttcgagtggggcagtaaacacagcaaagagaatagaaacttctcagaagatgtgctggggtggagagagtcgttcgacctgctgctgagcagtaaaaatggagtggctgccttccacgctttcctgaagacagagttcagtgaggagaacctggagttctggctggcctgtgaggagttcaagaagatccgatcagctaccaagctggcctccagggcacaccagatctttgaggagttcatttgcagtgaggcccctaaagaggtcaacattgaccatgagacccgcgagctgacgaggatgaacctgcagactgccacagccacatgctttgatgcggctcaggggaagacacgtaccctgatggagaaggactcctacccacgcttcctgaagtcgcctgcttaccgggacctggctgcccaagcctcagccgcctctgccactctgtccagctgcagcctggacgagccctcacacacctgagtctccacggcagtgaggaagccagccgggaagagaggttgagtcacccatccccgaggtggctgcccctgtgtgggaggcaggttctgcaaagcaagtgcaagaggacaaaaaaaaaaaaaaaaaaaaaaaaaatgcgctccagcagcctgtttgggaagcagcagtctctccttcagatactgtgggactcatgctggagaggagccgcccacttccaggacctgtgaataagggctaatgatgagggttggtggggctctctgtggggcaaaaaggtggtatgggggttagcactggctctcgttctcaccggagaaggaagtgttctagtgtggtttaggaaacatgtggataaagggaaccatgaaaatgagaggaggaaagacatccagatcagctgttttgcctgttgctcagttgactctgattgcatcctgttttcctaattcccagactgttctgggcacggaagggaccctggatgtggagtcttcccctttggccctcctcactggcctctgggctagcccagagtcccttagcttgtacctcgtaacactcctgtgtgtctgtccagccttgcagtcatgtcaaggccagcaagctgatgtgactcttgccccatgcgagatatttatacctcaaacactggcctgtgagccctttccaagtcagtggagagccctgaaaggaggctcacttgaatccagctcagtgctctgggtggccccctgcaggtggcccctgaccctgcgttgcagcagggtccacctgtgagcaggcccgccctggggcctcttcctggatgtgccctctctgagttctgtgctgtctcttggaggcagggcccaggagaacaaagtgtggaggcctcggggagtggcttttccagctctcatgccccgcagtgtggaacaaggcagaaaaggatcctaggaaataagtctcttggcggtccctgagagtcctgctgaaatccagccagtgttttttgtggtatgagaacaggcaaaaagagatgccccgagatagaaggggagccttgtgtttctttcctgcagacgtgagatgaacactggagtgggcagaggtggcccaggaccatggcacccttagagtgcagaagctggggggagaggctgcttcgaagggcaggactggggataatcagaacctgcctgtcacctcagggcatcactgaacaaacatttcctgatgggaactcctgcggcagagcccaggctggggaagtgaactacccagggcagcccctttgtggcccaggataatcaacactgttctctctgtaccatgagctcctccaggagattatttaagtgtattgtatcattggttttctgtgattgtcataacattgtttttgttattgttggtgctgttgttatttattattgtaatttcagtttgcctctactggagaatctcagcaggggtttcagcctgactgtctccctttctctaccagactctacctctgaatgtgctgggaacctcttggagcctgtcaggaactcctcactgtttaaatatttatttattgtgacaaatggagctggtttcctagatatgaatgatgtttgcaatccccattttcctgtttcagcatgttatattcttataaaataaaagcaaaagtcaaatatgaaaaaaaaaaaaaaaaaaaaa

SEQ ID NO: 162 - DNA, 5083 bp, Homo Sapiens
agaagagcgatgggagggggtgacgtggcagtgacaggcgcataaactgaaatgaatggcggaaacagcagccaatcggcgatcagattggccgggcattccgcattctcccgtcctccctgagcgctggaaacttcaggaaagcaccaatgagcttccccaaaagtctgattggcctttatctgaaccaatcaaaggtgggtctggcggacgcgtcccaccccaggctctcactgggcgctgtagaatgacaggcccgagagaaatgccaatatccgcggggtcttcctcaagtgacactcagcggcaccaatcgacgtccttcttcccggcggccgagccctcctccccgcggctggccgggcggggcggggacgctgcgcggcggtggctgatgcggtagccgtgtggggcgctccgggcggcgacggcggctctcgtaggcggttccggtcttgtatctccaggcggcggcggctcatggcggcgacggagctgagaggagtggtggggccaggcccggcagccattgcagcacttggcggcggcggcgccggtcccccagtggtgggaggaggcggcggccgcggagatgcggggccaggctccggggccgcgtcagggacggtggtcgcggcggcggcgggaggcccgggcccgggggccgggggagtggcggcggctggcccggcccctgcgccgccgactgggggctcgggcggctcgggcgctgggggttcgggctcggctcgagagggctggctcttcaaatggaccaattatatcaaaggctaccagcggcgatggttcgtgctgagcaacgggctcctgagctactacagatcaaaggcagaaatgagacatacctgccgtggtaccatcaacctcgccacagccaacatcaccgtggaggactcctgcaacttcatcatttccaatgggggtgctcagacctaccatctgaaagctagttcagaagttgagcggcagcgctgggtgacggccctggaactggccaaggccaaagctgtgaagatgctggcagagtcagatgaatcaggagatgaagagtctgtctcacaaactgacaagactgagctgcagaatacccttcggaccctctctagcaaagtagaggacttgagcacgtgcaatgacttgatagctaagcatggcacagctctgcagcgttctctcagtgagctggagtccctgaagttgcctgctgagagcaatgaaaagatcaaacaggtcaacgaacgagccacactctttaggataacatccaatgccatgatcaacgcctgcagagatttcctcatgttagcccagacccatagtaaaaaatggcaaaagtcactacagtatgaaagagaccagcgtatccgactggaagaaaccctcgagcagctggcgaagcagcataatcacctggagagggccttccgaggagccacggtgctgccggcaaacactcctggcaatgtgggttctggtaaagatcagtgctgctctggcaaaggggacatgagcgatgaagatgatgagaatgaattttttgatgcacctgagatcatcaccatgcctgaaaatttgggccacaaacgtactggcagcaatatcagtggagccagcagtgacatcagccttgatgaacagtacaagcatcagctggaggagaccaaaaaggaaaagagaaccagaataccatacaagccaaactatagcctcaatttatggagcatcatgaagaactgcattggaaaagaactctctaagatccccatgccggtaaactttaatgagcccttgtccatgcttcagcgccttactgaagatctggaataccatgagctgttagaccgagctgcaaaatgtgagaattctctagaacagctctgttatgttgcagctttcaccgtgtcctcctactccactactgtcttccgcaccagtaagccattcaacccactgcttggggagacctttgagctggaccgattagaggagaatgggtaccgatccctctgtgaacaggtgagtcatcatccccctgctgctgcgcaccatgctgagtccaaaaatggctggacattgcgtcaggaaatcaaaatcaccagcaagtttcgaggcaaatacctctccattatgcccctcggtaccattcattgtattttccatgcaactgggcaccactacacttggaagaaagttaccacaactgtacacaacattattgtgggcaagttgtggatagatcagtctggcgaaattgatattgtgaatcacaagacaggagacaagtgtaatcttaaatttgttccttatagctacttctctcgggatgtagcaagaaaggtgacgggggaagtgacagatccatcaggaaaagtccactttgctcttctggggacgtgggatgagaaaatggaatgtttcaaagtacagccagtcattggggaaaatgggggtgatgctcgacagagaggccatgaagcagaggaaagcagggtcatgctgtggaaaaggaatcctttaccgaagaatgcagaaaacatgtactacttctcagagcttgctctgactctcaatgcttgggaaagtggcactgcccccacagacagccggttacgacctgaccagagactgatggaaaatggacgctgggatgaagcaaatgcggagaagcagcgcctggaggaaaaacaaagactttccagaaagaagagagaagcggaagctatgaaagccacagaggatggcacaccatatgatccctataaggcactgtggtttgagcggaagaaggaccctgttaccaaggagttaacccatatttataggggagaatactgggagtgtaaagaaaaacaggactggagctcatgcccggacattttctgaaacggcagtaacaaaaaagaggagcatataatggagaagaggacagaggatgtgtgggaaagctggaagttgtgactctcttaccaagtgctttcctcaagtttgtctctcttgaccaatcattttttccaaatcaatcaccagaaggagacaccagtggtggtgattggctggttgccttagctgattgaaactgaaatcgacataggagatactatgtctgtaagggagaggtttagtggccgaaggttagtgttattccacatccacgaagtcaagtattcttggctcttctttctccctctgcccccatttaagacaatgtcactcaccctccccttgtagtatcctgctcagccaagatctgcctaagattatgattcaggggcattttggtgctgttaaaagcaagagccgaatttagaagttcccttaaaaagaaacacataagacttaccaatggaggcattgtgaatggttgcagtggagcttaggtataacatcatcaagtgtgttcacacgcggggtcggtttaatggagtgtccacgcggagataactgcgatattggaacacctgtgagagagattgttctatagggctggaatattcagagttacattcttggaagtttctgtttttacttgcatcaaacacccctctgttgttctccatcatctttaatagcaactggagaccactttggtcattggtaagggggtgcattctcctcacaaaggggttttatggacttcctcaggcggagagcttctgagaacacaggcaggatggaaaaagactactagccacttttgctttcccaaccccccttaatgccatccttcattgtctttctggcttctcttcttctggcacagtaccattttgggtctgtgccccagtgtggagcaaaacattgcctgtcccattctgatatacttcagaatttgagagcagaagttaatgtggaacaaaagttttcaccatctctcaagccccaaggactggagccacctctggaataatgtgttaaatatctgtatattatatatatgtagagaaaaatctaattttttggtttgatttccttcccattaagaatcttgttttttgatacccttgtctccctgagactctttcttggacacgtgttgatgtggatggcactcctgctctccatcttttatgggcagagagatttcaaaacctgagcaggatcatgtctggcagttactaaacagggactttgtccatggtttgtatcatggggtgcctactgctgtctaaactctgctctcctaattagctgactcttgaaaatgaaatcctaacctctttcctgcctcttttctttctcttttcaggaagagtgtgggtagaaagtccggagggcaacttccaatttaattctgctctgtccggcgcataggctgaattccaaaagaactttcttcctaggatgtggggcttaaagcaccgtcatgtggggtggatcagataattgctcctgtggggccctggcttccttctctgtttgtgcagtatttgtttttgttgtcttgttgagaaatatcccctgtgcaacccacccttggttgaggatcacaaattgaggtgccttccttgtatgctttttgttagtattttttgtttttgttccttaactgctgagcctcagccagcgtgggtcctgggggaaataccattccaaaggaagccatccctatggggaaattggttttactgggtaaattaatacttttatttcttcccctatcccttccttcctagttgtgataaacatgggagaggagtgactttgactgctggggaatttcctcctaagaaccttattcccaaaataagccagggattatgtcaaggcttctttcaaggaggctcataaaagcagtgacctcatccggggctttggatagagtgagaattccccaactaaattggacttctctgctttatccccttctcttccttcaccatctgcactacatttctggctgatcccaatcagattcccgctaatggaagaagtttagaatctttcaggtggaataaagtcacatgaaaacaaaacacaactatatatattttcagtttttttgccttattgatttttttccaaaaaaaaaaaactactaaattaaataattttttaaaagtca

SEQ ID NO: 163 - DNA, 1693 bp, Homo Sapiens
acgggccaaggcggcgcgtctcgggggtggagcctggaggtgaccgcgccgctgcaacgcccccaccccccgcggtcgcagtggttcagcccgagaacttttcattcataaaaagaaaagactccgcacggcgcgggtgagtcagaacccagcagccgtgtaccccgcagagccgccagccccgggcatgttccgagacttcggggaacccggcccgagctccgggaacggcggcgggtacggcggccccgcgcagcccccggccgcagcgcaggcagcccagcagaagttccacctggtgccaagcatcaacaccatgagtggcagtcaggagctgcagtggatggtacagcctcatttcctggggcccagcagttaccccaggcctctgacctaccctcagtacagccccccacaaccccggccaggagtcatccgggccctggggccgcctccaggggtacgtcgaaggccttgtgaacagatcagcccggaggaagaggagcgccgccgagtaaggcgcgagcggaacaagctggctgcggccaagtgcaggaaccggaggaaggaactgaccgacttcctgcaggcggagactgacaaactggaagatgagaaatctgggctgcagcgagagattgaggagctgcagaagcagaaggagcgcctagagctggtgctggaagcccaccgacccatctgcaaaatcccggaaggagccaaggagggggacacaggcagtaccagtggcaccagcagcccaccagccccctgccgccctgtaccttgtatctccctttccccagggcctgtgcttgaacctgaggcactgcacacccccacactcatgaccacaccctccctaactcctttcacccccagcctggtcttcacctaccccagcactcctgagccttgtgcctcagctcatcgcaagagtagcagcagcagcggagacccatcctctgacccccttggctctccaaccctcctcgctttgtgaggcgcctgagccctactccctgcagatgccaccctagccaatgtctcctccccttcccccaccggtccagctggcctggacagtatcccacatccaactccagcaacttcttctccatccctctaatgagactgaccatattgtgcttcacagtagagccagcttggggccaccaaagctgcccactgtttctcttgagctggcctctctagcacaatttgcactaaatcagagacaaaatatttcccatttgtgccagaggaatcctggcagcccagagactttgtagatccttagaggtcctctggagccctaaccccttccagatcactgccacactctccatcaccctcttcctgtgatccacccaaccctatctcctgacagaaggtgccactttacccacctagaacactaactcaccagccccactgccagcagcagcaggtgattggaccaggccattctgccgccccctcctgaaccgcacagctcaggaggcgcccttggcttctgtgatgagctgatctgcggatctcagctttgagaagccttcagctccagggaatccaagcctccacagcgagggcagctgctatttattttcctaaagagagtatttttatacaaacctaccaaaatggaataaaaggcttgaagctgtgaaaaaaaaaaaaaaaaaaaaaaaaa

SEQ ID NO: 164 - DNA, 1797 bp, Homo Sapiens
cttcgtggactgggctgtacggtgcgcgtgacggctgcgtgcggcgggaatcatggctgctcgcagagctctgcacttcgtattcaaagtgggaaaccgcttccagacggcgcgtttctatcgggacgtcctggggatgaaggttctgcggcatgaggaatttgaagaaggctgcaaagctgcctgtaatgggccttatgatgggaaatggagtaaaacaatggtgggatttgggcctgaggatgatcattttgtcgcagaactgacttacaattatggcgtcggagactacaagcttggcaatgactttatgggaatcacgctcgcttctagccaggctgtcagcaacgccaggaagctggagtggccactgacggaagttgcagaaggtgtttttgaaaccgaggccccgggaggatataagttctatttgcagaatcgcagtctgcctcagtcagatcctgtattaaaagtaactctagcagtgtctgatcttcaaaagtccttgaactactggtgtaatctactgggaatgaaaatttatgaaaaagatgaagaaaagcaaagggctttgctgggctatgctgataaccagtgtaagctggagctacagggcgtcaagggtggggtggaccatgcagcagcttttggaagaattgccttctcttgcccccagaaagagttgccagacttagaagacttgatgaaaagggagaaccagaagattctgactcccctggtgagcctggacaccccagggaaagcaacagtacaggtggtcattctggccgaccctgacggacatgaaatttgctttgtcggggatgaagcatttcgagaactttctaagatggatccagagggaagcaaattgttggatgatgcaatgtcagcagataaaagtgacgagtggtttgccaaacacaataaacccaaagcttcaggttaacggaagacatgatgcagagcaagcctctgtgattcctgcccagcacctgtgaggcctgacgtgtcagttcccaataaatgctcttctgatttgtttcccgtacaggcaaggaggcttgggtagtgcagatttgtgtatttcaatctttgaaagctctgatgtaatttagaaatgaaatccaatcatgagtccaggtagagaacgcctgctgtaatctacactgttgctgggactgcgcattctgtatataactgtgttggatgagtgacagatgattgtccagactaggacagcggcatgaacatgactttggttgggattgcggatagttagggttacctctgaatcgtgtagcttttatgagagcagctgtgcaagtgaatccacattaatgccttgtcgtggtgccattcccagcgcctgacgatacgctcttctattgtcttattctggcaggttttgacgttttaaattttttaaagaaattttattccttggaccaaaaggtttggttaaccacccccctcttacttgctttcacattttgagtgtccagaggaaacagaaaggaatgagtgtgtgacgttgctgcacgcctgactctgtgcgagcttctttctgtgtatatattttgttttatttttttccgtgtatatttttaatcccgacagaacatcatgtgagatttctttaaaatggattaaacgatttcttcagcctgaaaaaaaaggttttgaaaatgttttcttgtagttttgtttggttctaaacaacaaataggttttaatcactcgaaatggaattatattgtgtattcattgaataaattttttttgaaagtaaaaaaa

SEQ ID NO: 165 - DNA, 4188 bp, Homo Sapiens
aggctccagtctccggccgagtcttctcgcagccgcaacccacctggggccagcccagagctgccagcgccgctcggctccctccctccctcccggcccttcggccgcggcggcgtgcgcctgccttttccgggggcgggggcctggcccgcgcgctcccctcccgcaggcgccacctcggacatccccgggattgctacttctctgccaacttcgccaactcgccagcacttggagaggcccggctcccctcccggcgccctctgaccgcccccgccccgcgcgctctccgaccaccgcctctcggatgaccaggttccaggggagctgagcgagtcgcctcccccgcccagcttcagccctggctgcagctgcagcgcgagccatgcgcccccagtgcaccccggcccggcccaccgccccggggccattctgctgaccgcccagccccgagccccgacagtggcaagttgcggctactgcagttgcaagctccggccaacccggaggagccccagcggggagcgcagtgttgcgccccccgcccccgcgcgccccgcagcagccgggcgttcactcatcctccctcccccaccgtccctcccttttctcctcaagtcctgaagttgagtttgagaggcgacacggcggcggcggccgcgctgctcccgctcctctgcctccccatggatatgcactgcaaagcagaccccttctccgcgatgcacccagggcacgggggtgtgaaccagctcgggggggtgtttgtgaacggccggcccctacccgacgtggtgaggcagcgcatcgtggagctggcccaccagggtgtgcggccctgtgacatctcccggcagctgcgggtcagccacggctgtgtcagcaaaatcctgggcaggtactacgagaccggcagcatcaagccgggtgtgatcggtggctccaagcccaaagtggcgacgcccaaagtggtggacaagattgctgaatacaaacgacagaacccgactatgttcgcctgggagattcgagaccggctcctggccgagggcatctgtgacaatgacacagtgcccagcgtctcttccatcaacagaatcatccggaccaaagttcagcagcctttccacccaacgccggatggggctgggacaggagtgaccgcccctggccacaccattgttcccagcacggcctcccctcctgtttccagcgcctccaatgacccagtgggatcctactccatcaatgggatcctggggattcctcgctccaatggtgagaagaggaaacgtgatgaagatgtgtctgagggctcagtccccaatggagattcccagagtggtgtggacagtttgcggaagcacttgcgagctgacaccttcacccagcagcagctggaagctttggatcgggtctttgagcgtccttcctaccctgacgtcttccaggcatcagagcacatcaaatcagaacaggggaacgagtactccctcccagccctgacccctgggcttgatgaagtcaagtcgagtctatctgcatccaccaaccctgagctgggcagcaacgtgtcaggcacacagacatacccagttgtgactggtcgtgacatggcgagcaccactctgcctggttacccccctcacgtgccccccactggccagggaagctaccccacctccaccctggcaggaatggtgcctgggagcgagttctccggcaacccgtacagccacccccagtacacggcctacaacgaggcttggagattcagcaaccccgccttactaatgccgccccccggtccgcccctgccgctgctgccgctgcctatgaccgccactagttaccgcggggaccacatcaagcttcaggccgacagcttcggcctccacatcgtccccgtctgaccccaccccggagggagggaggaccgacgcgacgcgatgcctcccggccaccgccccagcctcaccccatcccacgacccccgcaacccttcacatcacccccctcgaaggtcggacaggacgggtggagccgtgggcgggaccctcaggcccgggcccgccgcccccagccccgcctgccgcccctccccgcctgcctggactgcgcggcgccgtgagggggattcggcccagctcgtcccggcctccaccaagccagccccgaagcccgccagccaccctgccggactcgggcgcgacctgctggcgcgcgccggatgtttctgtgacacacaatcagcgcggaccgcagcgcggcccagccccgggcacccgcctcggacgctcgggcgccaggaggcttcgctggaggggctgggccaaggagattaagaagaaaacgactttctgcaggaggaagagcccgctgccgaatccctgggaaaaattcttttcccccagtgccagccggactgccctcgccttccgggtgtgccctgtcccagaagatggaatgggggtgtgggggtccggctctaggaacgggctttgggggcgtcaggtctttccaaggttgggacccaaggatcggggggcccagcagcccgcaccgatcgagccggactctcggctcttcactgctcctcctggcctgcctagttccccagggcccggcacctcctgctgcgagacccggctctcagccctgccttgcccctacctcagcgtctcttccacctgctggcctcccagtttcccctcctgccagtccttcgcctgtcccttgacgccctgcatcctcctccctgactcgcagccccatcggacgctctcccgggaccgccgcaggaccagtttccatagactgcggactggggtcttcctccagcagttacttgatgccccctcccccgacacagactctcaatctgccggtggtaagaaccggttctgagctggcgtctgagctgctgcggggtggaagtggggggctgcccactccactcctcccatcccctcccagcctcctcctccggcaggaactgaacagaaccacaaaaagtctacatttatttaatatgatggtctttgcaaaaaggaacaaaacaacacaaaagcccaccaggctgctgctttgtggaaagacggtgtgtgtcgtgtgaaggcgaaacccggtgtacataacccctccccctccgccccgccccgcccggccccgtagagtccctgtcgcccgccggccctgcctgtagatacgccccgctgtctgtgctgtgagagtcgccgctcgctgggggggaagggggggacacagctacacgcccattaaagcacagcacgtcctgggggaggggggcattttttatgttacaaaaaaaaattacgaaagaaaagaaatctctatgcaaaatgacgaacatggtcctgtggactcctctggcctgttttgttggctctttctctgtaattccgtgttttcgctttttcctccctgcccctctctccctctgcccctctctcctctccgcttctctccccctctgtctctgtctctctccgtctctgtcgctcttgtctgtctgtctctgctctttcctcggcctctctccccagacctggcccggccgccctgtctccgcaggctagatccgaggtggcagctccagcccccgggctcgccccctcgcgggcgtgccccgcgcgccccgggcggccgaaggccgggccgccccgtcccgccccgtagttgctctttcggtagtggcgatgcgccctgcatgtctcctcacccgtggatcgtgacgactcgaaataacagaaacaaagtcaataaagtgaaaataaataaaaatccttgaacaaatccgaaaaggcttggagtcctcgcccagatctctctcccctgcgagccctttttatttgagaaggaaaaagagaaaagagaatcgtttaagggaacccggcgcccagccaggctccagtggcccgaacggggcggcgagggcggcgagggcgccgaggtccggcccatcccagtcctgtggggctggccgggcagagaccccggacccaggcccaggcctaacctgctaaatgtccccggacggttctggtctcctcggccactttcagtgcgtcggttcgttttgattctttttcttttgtgcacataagaaataaataataataataaataaagaataaaattttgtatgtcaaaaaaaaaaaaaaaaaa

SEQ ID NO: 166 - DNA, 3228 bp, Homo Sapiens
attaccaggcacgcgcaggaaacatggcggcggcgggtgttgtgagcgggaagattatatatgaacaagaaggagtatatattcactcatcttgtggaaagaccaatgaccaagacggcttgatttcaggaatattacgtgttttagaaaaggatgccgaagtaatagtggactggagaccattggatgatgcattagattcctctagtattctctatgctagaaaggactccagttcagttgtagaatggactcaggccccaaaagaaagaggtcatcgaggatcagaacatctgaacagttacgaagcagaatgggacatggttaatacagtttcatttaaaaggaaaccacataccaatggagatgctccaagtcatagaaatgggaaaagcaaatggtcattcctgttcagtttgacagacctgaaatcaatcaagcaaaacaaagagggtatgggctggtcctatttggtattctgtctaaaggatgacgtcgttctccctgctctacactttcatcaaggagatagcaaactactgattgaatctcttgaaaaatatgtggtattgtgtgaatctccacaggataaaagaacacttcttgtgaattgtcagaataagagtctttcacagtcttttgaaaatcttcttgatgagccagcatatggtttaatacaagcaggactgctagacagaagaaagctgttgtgggccattcaccactggaaaaaaattaaaaaggacccttatacggcaactatgataggattttccaaagtcacaaactacatttttgacagtttgagaggcagcgatccctctacacatcaacgaccaccttcagaaatggcagattttcttagtgatgctattccaggtctaaagataaatcaacaagaagaaccaggatttgaagtcatcacaagaattgatttgggggaacgccctgttgttcaaaggagagaaccggtatcactggaagaatggactaagaacattgattctgaaggaagaattttaaatgtagataatatgaagcagatgatatttagagggggacttagtcatgcattgagaaagcaagcatggaaatttcttctgggttattttccctgggacagtaccaaggaggaaagaacccaattacaaaagcaaaaaactgatgaatacttcagaatgaaactgcagtggaaatccatcagccaggaacaagagaaaagaaattcgaggttaagagattatagaagtcttatcgaaaaagatgttaacagaacagatcgaacaaacaagttttatgaaggccaagataatccagggttgattttacttcatgacattttgatgacctactgtatgtatgattttgatttaggatatgttcaaggaatgagtgatttactttcccctcttttatatgtgatggaaaatgaagtggatgccttttggtgctttgcctcttacatggaccaaatgcatcagaattttgaagaacaaatgcaaggcatgaagacccagctaattcagctgagtaccttacttcgattgttagacagtggattttgcagttacttagaatctcaggactctggatacctttatttttgcttcaggtggcttttaatcagattcaaaagggaatttggttttctagatattcttcgattatgggaggtaatgtggaccgaactaccatgtacaaatttccatcttcttctctgttgtgctattctggaatcagaaaagcagcaaataatggaaaagcattatggcttcaatgaaatacttaagcatatcaatgaattgtccatgaaaattgatgtggaagatatactctgcaaggcagaagcaatttctctacagatggtaaaatgcaaggaattgccacaagcagtctgtgagatccttgggcttcaaggcagtgaagttacaacaccagattcagacgttggtgaagacgaaaatgttgtcatgactccttgtcctacatctgcatttcaaagtaatgccttgcctacactctctgccagtggagccagaaatgacagcccaacacagataccagtgtcctcagatgtctgcagattaacacctgcatgatcactgttcttgcttttttgggaagagacactttgttgcaaccctttttcaagtacttgaaagttgaaaatttgaaatcttggtattgatcatgctttaaggtttatgtaaagaaagtgtactgatgttcttacattaaagctttacaaagatttaaactaattatttttgtagttacttctaccaaatagcctttccttttcgataacattcctcagtatttttatagccaagtacattttattttcttgctgatgaactggaattggataaatattgcaagtggatgagttggaaattatgcactttgaaaaacattcactttgtttaagcttattgggtttcagatttgattaaattaaatgtggaggctttctatagcattctaagctgagaagtagattgttacccagtaatgaaataaaaaataaaaataaaaggatttttttctctattgtttacgacagtactcagcttaaatatttatgctggtcaaatgtgatttaaattggacattttcatcaatgcagtctaatgtgtagataaatatttcaaccataataagtggattggcagtatattttttacattgaacttttcttcacttgtatataaagattatatataagtacttatttatgagtataagaaaggttaggcatattttcattaactgaataaacgacttgatttatataacctggtttatcaaaatttaacatggcttcagtatgagatctttttcaaaactattttcttaaacatttatttcatgagattatgttcaaccctgtacctggtgtaattttaaaattaattgcttgtaacctcactttactaataatgtttattatctttcctaataatgcattaactgattaatcaggtgtttaaatttttataaaatactcttgcaaaaagtttatttgaaaaatttctagatggtctcatgagtttcaaaataataatttttgtgtatgaacaaagctgttgtttttaccatgcagtattgcatgattttaagttatgtggaattaacataactgattttgttttaattgtaagttgttaactcctgtatatatcattaaaataaatctgaagttgaagtggaaaaaaaaaaaaaaaa

SEQ ID NO: 167 - DNA, 1802 bp, Homo Sapiens
ccaccccggtgcgcgggtatggcggccagcctgtggatgggcgacctggaaccctacatggatgagaacttcatctccagagcctttgccaccatgggggagaccgtaatgagcgtcaaaattatccgaaaccgcctcactgggatcccagctggctactgctttgtagaatttgcagatttggccacagctgagaagtgtttgcataaaattaatgggaaaccccttccaggagccacacctgcgaaacgttttaaactgaactatgccacttacgggaaacaaccagataacagccctgagtattccctctttgtgggggacctgaccccggacgtggatgatggcatgctgtatgaattcttcgtcaaagtctacccctcctgtcggggaggcaaggtggttttggaccagacaggcgtgtctaagggttatggttttgtgaaattcacagatgaactggaacagaagcgagccctgacggagtgccagggagcagtgggactggggtctaagcctgtgcggctgagcgtggcaatccctaaagcgagccgtgtaaagccagtggaatatagtcagatgtacagttatagctacaaccagtattatcagcagtaccagaactactatgctcagtggggctatgaccagaacacaggcagctacagctacagttacccccagtatggctatacccagagcaccatgcagacatatgaagaagttggagatgatgcattggaagaccccatgccacagctggatgtgactgaggccaacaaggagttcatggaacagagtgaggagctgtatgacgctctgatggactgtcactggcagcccctggacacagtgtcttcagagatccctgccatgatgtagccaggccaaaggacaagccaggttgcatgatgtgagggagatgagagactcctttttaaaaattgtgaaacctttttggaaatatgatttgtaagattttaataatgactgtttttggagatcatgaatgtttctacaacactgctgcattcatttgaccatttgagtttgaagaccaagggaacaacttttaaacaaggttcaaattggtttccttcacaggaatcctttgtccaggtagttatccacataggacagtttgggattatccaaaactgggatgagcagcttgggataattcacacactaaagcctgagttcaaggtttctcagttgacaggtaggtatgtaaatcagggttctctggagtatttgtaggacctgccatatttgagtcctaacttggtgcaagtctggcagctaggtagaaaaggcactctagcaggtgtggtaggagcacgccccagaaggtagaatgtggtggggtgtgatggaacaggccagttggcctaagaattagtacttgctctaataatgggtttcatctattttcatgagttgcagcatctgcatatacaaggcctggatcactttaggatcaatattttgacacgggagaaggcagctcagaaaggattaaggaagatagctcaaagccaaagcagaccctccgtgtgaactttatactgctcacttccgtgtttcccaagtaaatggggaaactgtccaaccttgtcatgtgttgggacttactgcttgaggcaaagcattcatcctacatcataaaaaatctccaaagatctctttaagggctgggcatggtggctcactttgggagatggattgcttgagctcgggaagagaccagttcggtctctacaaaaaaatacaaacacaaatataaaaaaaaaaaaaaaaaa

SEQ ID NO: 168 - DNA, 2332 bp, Homo Sapiens
aggatgcgcggggacgcgccaccgccctccgcgcccagttccgccggcgcttccccggcggctcccgggcgctgactctcccgggcttttccgcctttctcgctcccgccccgccgggcggttcggcggccggtccccggaccccgccgggagctgctcgtctcaccctcgccacggcgcggacaataaattaatgcatcgcgcttgagtggagggggcggctgggcgcctcggtggtagctttctctcctggctggagacgaccacaaccgacatgggctgtttctgcgctgttccggaagaattttactgcgaagttttgctcctggatgaatccaagttaacccttaccacccagcagcagggcatcaagaagtcaacgaaaggttccgttgtccttgaccacgtattccatcacgtaaaccttgtggagatagattattttgggctacgttactgtgacagaagccatcagacgtattggctggatcctgcaaaaacccttgctgaacacaaagaactgatcaacactggacctccatatactttgtattttggtattaaattctatgctgaagatccatgtaaacttaaagaagaaataaccagatatcagtttttcttgcaggtgaagcaagatgtccttcagggccgtctgccctgtcccgtcaacactgctgctcagctgggagcgtatgccatccagtcggagcttggagattatgacccatataaacatactgcaggatatgtatctgagtaccggtttgttcctgatcagaaggaagaacttgaagaagccatagaaaggattcataaaactctaatgggtcagattccttctgaggctgagctgaattacttgaggactgccaaatccctggagatgtatggcgttgacctccatcccgtctatggagaaaacaagtctgagtatttcttaggattaactccggttggtgttgttgtgtacaagaataaaaagcaagtggggaagtatttctggcctcggattacaaaggttcacttcaaggagactcaatttgaactcagagtactgggaaaagattgtaacgaaacctcattcttttttgaagctcggagtaaaactgcttgcaagcacctctggaagtgcagtgtggaacatcatacattttttagaatgccagaaaatgaatccaattcactgtcaagaaaactcagcaagtttggatccatacgttataagcaccgctacagtggcaggacagctttgcaaatgagccgagatctttctattcagcttccccggcctgatcagaatgtgacaagaagtcgaagcaagacttaccctaagcgaatagcacaaacacagccagctgaatcaaacaccatcagtaggataactgcaaacatggaaaatggagaaaatgaaggaacaattaaaattattgcaccttcaccagtaaaaagctttaagaaagcaaagaatgaaaatagccctgatacccaaagaagcaaatctcatgcaccgtgggaagaaaatggcccccagagtggactctacaattctcccagtgatcgcactaagtcgccaaagttcccttacacgcgtcgccgaaacccctcctgtggaagtgacaatgattctgtacagcctgtgaggaggaggaaagcccataacagtggtgaagattcagatcttaagcaaaggaggaggtcacgttcacgctgtaacaccagcagtggtagtgaatcagaaaattctaatagagaacaccggaaaaagagaaacagaatacggcaggagaatgatatggttgattcagcgcctcagtgggaagctgtattaaggagacaaaaggaaaaaaaccaagccgaccccaacagcaggcgatccagacacagatctcgttcgagaagccccgatatccaagcaaaagaagagttatggaagcacattcaaaaagaacttgtggatccatccggattgtccgaagaacaattaaaagagattccatacactaaaatagaggacacaaggtgacccaatccgcatcaggcattctcattcgccacgaagttaccgccagtatcgcaggtcccagtgttcagatggggagcgatcagttctctcggaagtgaattcaaaaacagatcttgtaccaccacttccggtgacccattcttcggatgctcagggttctggggatgctacagttcatcagagaagaaatgggtctaaagatagcctgatggaagaaaaacctcagacatctacaaacaacctggctggaaaacacacagcaaaaacaataaaaactatacaagcttcccgcctcaagaaaaaaaa

SEQ ID NO: 169 - DNA, 4360 bp, Homo Sapiens
gcggccgcggcagggctgggcctgcgactacccgaggaggctgacctccagcccgggcgcccggttcagcgccgccccggccggcgccggtgcctgccaggcactcagggaggcgggggcgcagtggaggaggcggcgccatcgcgaagcgagcgcctcgcccgcactcagccttgccaccccgcccgcagtccaggctggactgggcggcatttgccgaggctcctcggccaggccccgtccgcccgagccgcgctgagacccgggcagcggccgcgtggagaggaggtggcagcggcccgggaggccggagccaagccagcgacccaccatggagacccgctacaacctgaagagtccggctgttaaacgtttaatgaaagaagcggcagaattgaaagatccaacagatcattaccatgcgcagcctttagaggataacctttttgaatggcacttcacggttagagggcccccagactccgattttgatggaggagtttatcacgggcggatagtactgccaccagagtatcccatgaaaccaccaagcattattctcctaacggctaatggtcgatttgaagtgggcaagaaaatctgtttgagcatctcaggccatcatcctgaaacttggcagccttcgtggagtataaggacagcattattagccatcattgggtttatgccaacaaaaggagagggagccataggttctctagattacactcctgaggaaagaagagcacttgccaaaaaatcacaagatttctgttgtgaaggatgtggctctgccatgaaggatgtcctgttgcctttaaaatctggaagcgattcaagccaagctgaccaagaagccaaagaactggctaggcaaataagctttaaggcagaagtcaattcatctggaaagactatctctgagtcagacttaaaccactctttttcactaactgatttacaagatgatatacctacaacattccagggtgctacggccagtacatcgtacggactccagaattcctcagcagcatcctttcatcaacctacccaacctgtagctaagaatacctccatgagccctcgacagcgccgggcccagcagcagagtcagagaaggttgtctacttcaccagatgtaatccagggccaccagccaagagacaaccacactgatcatggtgggtcagctgtactgattgtcatcctgactttggcattggcagctcttatattccgacgaatatatctggcaaacgaatacatatttgactttgagttataatatggttttgtgacttatgagctgtgactcaactgcttcattaaacattctgcattgggtataatctaagaattgtttacaaaaagattattttgtatttacccttcattcctttttttgatccttgtaagtttagtataaatatatctagacattcagactgtgtctagcagttacgtcctgcttaaagggactagaagtcaaagttccttgtctcactatttgatctgctttgcagggaaataacttgttttttctcatgtttcatcttctttttatgtaaatttgtaatactttcctatattgccctttgaaatttttggataaaagatgatgttttaagttccaatgagtattactagttactcaataccacttattgagtactctgtttctacgtatgtagaatgtatagggatagaagagttgaaaagggaaagcaaaactcctcaagtagcttccttaaaatgtcattcataggagatgtactggaattgctcattctgtgactttatttgtgtcctaaacattcttcagtgaaaataattttatttcagtcaaacatttatgaggaaatgagatcacatctttgtcactggatgctacttgaagagggagtactttgtaaccactttgatatgctgttatcaccaccccctgccctctgctgccataatcacacaaatttaaaaagaaagaaaacagtcttccatagatttttaaggaagaaagggcccaagccaggagatcgcttggttttcttccagaagttaaatggggggatctgaagatttgaatgtttggtctgctttgaaatgtatgtcttttgggatgtattatatgcctagctttataatcagtataaattttaattattccaggaatatgcataatattgaaatatttcatgtcctattttaatagaaaacctcagggcccaagtaacagtgatagaagttagaaaaacctttacttagaattgtccacctagtcagagcccaagaaagaattttcagtggaaaaatcaatatataacttagtgctagctagcgccacagactctagtagataatattatcatcataatggctggtgaaaccatataatcacagaaaaacattgccttcagcatgttcagttcgcagcactgagggcactcttgagggtgttgttaatgaagatttaatttttaaatacaggtggttccaagctttcaaataggttatgctccaaaagtgttatttgtaagttaatttttttacaagtcaaacaatgttggaagtggtatttaggttctagatcggtccacgaaagttagcccatatgtatatcttgaatagtataggggagggtattcataaagtccttatgtggttttaactaagtgaaattatggacaagagaaataattgtaaaatcgtcttaaaggaaaatttaatttttactcctgtttatgggacattcgttctattaactgtcagacacaatttctgttttcatctgagagccagttttcctttatttctacatctaaaataagaacatattgtacactattatataatacagaattgtcttaaactttaataaattcgcattttaaaggtgtttacagattattttttatatctgtagctgaatttgttaaagtctaaaaagctcaaggactttatgaagatctcattatatgaggaaaatcataggttaccattttataactctattgccataagaaaatacactctaaaatcttgatttgaaacatattagaaaccttgattcagtgctcagtggtctcctagtaagaagtcaccgacggtagcgtcatatgagaagaaagaaatccccaccacctcaacctctgctgagattgtgtgctaggaacagccttccctccgtttcccctcagtcaaacttgagccagcctctggatcgatgtgatcttattgcatgtttccatggggtgtacctatactttaagccaatcctgctgcattcactgctaagttaaataaaaagccaagaagattttgcactgtgcagatcctttgctatctgacttgcatctcttcccccacctgtcagctagccacctgcttgtttgtgttgggatattttttagcacctgaagcaccatctgaaaggggcaccattttcttcttccctttgatctcacatatgctccctaaaaatccttaagttgtcaatctgatccccagtgtgaggttaatgagcaaaattggtctttggggccctttttgtccaagccccactgaaaggcctcttcagaaaactattatctttaaagccctactttaactccttaattccagcatacagctaaaactggatgtatattctggcaagtaaaggctgaggactcctctttaatcctcagatctagataactcatgacattttatttgaccaacatagcacatgatgagatatcaaggtaattaaaatagcatgcttgaaaaaaaaatacgtaatctgtttcacctgtaactgtttaagccaataaacttttcaaaatttatgtaatgtggggcttttatgtagcactttacgttttcatgctgcttattgttttattctactgaaaaaaatgaatttcaagattctcaacttttttaatttcaaaaattgtttattgttttgactataggaatacaaaatttcctattttgggagaataagaactctttttgtcatttttggctatgaataaactttctggtcttttgagaccacccatttttatagatcagaatcagaaaacaggtaaacctcactcacacatttggactcatttgaacaaaaatctaggccaaaatactgaaaagcctatgtgtttttttaattggaagtatatgtaaggttaatgcatttagtgaacgtgactaacaaagactaatgtgcacattaacagatgtactttttaaggttttatgggaggctgtgcattgctcaaaagctgttgggaacgccttctgaacagttgccttcagaactagtttgagctgctcaataaaaccagtgactttactcataaaaaaaaaaaaaaaaaaa

SEQ ID NO: 170 - DNA, 1371 bp, Homo Sapiens
gcggtggcggcggcggcggcggcgcgtggcaggtccggcgggcgcgaggcggcggcggaggcccgagcccggcccagcctcgtcccgcccggagcccgcctggctgctaccccgaccccggctccggtcccgtcctgtcccggcgcgccgcggcctcgccccggcccccgctcggcgcctcccgagggagcggcgctgccggccgagagcgcaggcccggccatgaccgacttcaaattgggtatcgtgcggctcggccgggtggccgggaagaccaaatacacgctgatcgatgagcaggacatcccgctggtggagagctactcctttgaggcccgaatggaagtggatgcagatggaaatggtgctaagatatttgcctatgcctttgacaagaaccgaggaaggggctctgggagactccttcatgagctgctgtgggagcggcaccgggggggcgtggccccgggcttccaggtggtgcacctcaacgctgtgaccgtggacaatcgcctggacaacctgcaactggtgccgtggggctggcggcccaaggctgaagagacctccagcaagcagagggagcaaagcttgtattggcttgcaattcagcagctgcctacagaccctatagaagaacagtttcctgtcctaaatgtgacccggtattataatgccaacggggatgtagtggaagaggaggagaactcttgcacctactatgagtgccactaccctccctgcacagtgattgagaagcagctccgggagttcaacatctgtgggcgctgccaggtggcccggtactgcggctcccagtgccagcagaaggactggcctgcccacaagaagcactgtcgggagaggaagcgtcccttccagcatgagcttgagccagagcgatgacgggcaggggagccacacatactcacagcccccgggctctaccctgggcacagcagagacagactggtggttgaacctggaggtgccaaaaaagccagctgcgggcccaggacagctgccgtgagactcccgatgtcacaggcagtctgtgtggttacagcgcccctcagtgttcatctccagcagagacaacggaggaggctcccaccaggacggttctcattatttatatgttaatatgtttgtaaactcatgtacagttttttttgggggggaggcaatgggaagggtagaaattacaaatagaatcatttgctgtaatccttaaatggcaaacggtcaggccacgtgactaaaaactgtcctgttgtcgaagcttctcccctgggccgccgggagccccgtggagcgcggcctgcacgggagttgtgtccacaaaggcaaagtaaaggggtggaatcatca

SEQ ID NO: 171 - DNA, 1816 bp, Homo Sapiens
gtgtggttgaggatgggctggcggcgggtccgggtccgctgcctggcgctgcgggcggcgggccatggtggtttggattgagccgggcccggccggggcgccgagtcggagggggtggcagtgagcggcggcagaggctacggggctcggtttggctgactggggagtcggcaggcggcaggaaccatgcgaggccagcggagcctgctgctgggcccggcccgcctctgcctccgcctccttctgctgctgggttacaggcgccgctgtccacctctactccggggtctagtacagcgctggcgctacggcaaggtctgcctgcgctccctgctctacaactcctttgggggcagtgacaccgctgttgatgctgcctttgagcctgtctactggctggtagacaacgtgatccgctggtttggagtggtgttcgtggtcctggtgatcgtgctgacaggctccattgtagctatcgcctacctgtgtgtcctgcctctcatcctccgaacctactcagtgccacgactctgctggcatttcttctatagccactggaatctgatcctgattgtcttccactactaccaggccatcaccactccgcctgggtacccaccccagggcaggaatgatatcgccaccgtctccatctgtaagaagtgcatttaccccaagccagcccgaacacaccactgcagcatctgcaacaggtgtgtgctgaagatggatcaccactgcccctggctaaacaattgtgtgggccactataaccatcggtacttcttctctttctgctttttcatgactctgggctgtgtctactgcagctatggaagttgggaccttttccgggaggcttatgctgccattgagaaaatgaaacagctcgacaagaacaaactacaggcggttgccaaccagacttatcaccagaccccaccacccaccttctcctttcgagaaaggatgactcacaagagtcttgtctacctctggttcctgtgcagttctgtggcacttgccctgggtgccctaactgtatggcatgctgttctcatcagtcgaggtgagactagcatcgaaaggcacatcaacaagaaggagagacgtcggctacaggccaagggcagagtatttaggaatccttacaactacggctgcttggacaactggaaggtattcctgggtgtggatacaggaaggcactggcttactcgggtgctcttaccttctagtcacttgccccatgggaatggaatgagctgggagccccctccctgggtgactgctcactcagcctctgtgatggcagtgtgagctggactgtgtcagccacgactcgagcactcattctgctccctatgttatttcaagggcctccaagggcagcttttctcagaatccttgatcaaaaagagccagtgggcctgccttagggtaccatgcaggacaattcaaggaccagcctttttaccactgcagaagaaagacacaatgtggagaaatcttaggactgacatccctttactcaggcaaacagaagttccaaccccagactaggggtcaggcagctagctacctaccttgcccagtgctgacccggacctcctccaggatacagcactggagttggccaccacctcttctacttgctgtctgaaaaaacacctgactagtacagctgagatcttggcttctcaacagggcaaagataccaggcctgctgctgaggtcactgccacttctcacatgctgcttaagggagcacaaataaaggtattcgatttttaaagataaaaaaaaaaaaaaaaaa

SEQ ID NO: 172 - DNA, 4576 bp, Homo Sapiens
gatccccgcccctgctgcccgccacgtccctcacgtaccactcggcagaggcgcggggaaacctggcgtactggctgtggcttctctagcgggactcggcatgaggctggcgcggctgcttcgcggagccgccttggccggcccgggcccggggctgcgcgccgccggcttcagccgcagcttcagctcggactcgggctccagcccggcgtccgagcgcggcgttccgggccaggtggacttctacgcgcgcttctcgccgtccccgctctccatgaagcagttcctggacttcggatcagtgaatgcttgtgaaaagacctcatttatgtttctgcggcaagagttgcctgtcagactggcaaatataatgaaagaaataagtctccttccagataatcttctcaggacaccatccgttcaattggtacaaagctggtatatccagagtcttcaggagcttcttgattttaaggacaaaagtgctgaggatgctaaagctatttatgactttacagatactgtgatacggatcagaaaccgacacaatgatgtcattcccacaatggcccagggtgtgattgaatacaaggagagctttggggtggatcctgtcaccagccagaatgttcagtactttttggatcgattctacatgagtcgcatttcaattagaatgttactcaatcagcactctttattgtttggtggaaaaggcaaaggaagtccatctcatcgaaaacacattggaagcataaatccaaactgcaatgtacttgaagttattaaagatggctatgaaaatgctaggcgtctgtgtgatttgtattatattaactctcccgaactagaacttgaagaactaaatgcaaaatcaccaggacagccaatacaagtggtttatgtaccatcccatctctatcacatggtgtttgaacttttcaagaatgcaatgagagccactatggaacaccatgccaacagaggtgtttacccccctattcaagttcatgtcacgctgggtaatgaggatttgactgtgaagatgagtgaccgaggaggtggcgttcctttgaggaaaattgacagacttttcaactacatgtattcaactgcaccaagacctcgtgttgagacctcccgcgcagtgcctctggctggttttggttatggattgcccatatcacgtctttacgcacaatacttccaaggagacctgaagctgtattccctagagggttacgggacagatgcagttatctacattaaggctctgtcaacagactcaatagaaagactcccagtgtataacaaagctgcctggaagcattacaacaccaaccacgaggctgatgactggtgcgtccccagcagagaacccaaagacatgacgacgttccgcagtgcctagacacacttgggacatcggaaaatccaaatgtggcttttgtattaaatttggaaggtatggtgttcagaactatattataccaagtactttatttatcgttttcacaaaactatttgagtagaataaatggaaactgaattccatttgtgcccgttaaacctcctaaaggatgaaattgcacctattttacacttatattttcacagttaattgaacatatttttaaacaactgtagttttgggcaacttttcactttgtggtagacttcagaagtgtggaaatcttcgggtttctataggaaactagttttttttttttaagaaatactttcatttatgtttgctagaaacattttctaaatgatagtgattagctggttagccatcttcctgttatttggaggagttctgccatcttttattcggtagtgacagctgtaatatggtcttcatgtttatcagtgacttgactacaagtaaagcagaaaacagttggcctgtaatcacagaaccagccacccttcggcgtctacatgcattgtcttagctctgaggttaatttaccatttttaaattttattgtaaagaagtgtaatgactagctctctgtggatctatgccaaaatcatgggccatcttttctaagtgtacttctgattaatgcaaggggaaatttttatactgaaaacaaacaaacaaactagcagctactaaaatagagaagaaattgagggcaaagtaatatgtctccaaaactgaactgattgcttgttgagattacctagaaagcttttggaaaaaaatagagcttttctgcatcctactccagatacactgaatcggaatccctagggctagagcctagaaatctcactttttaaaatgcttccaaggtaagtctgatgcctaccctaggttgggaaccactctttcaaagtaaacagtgatgacacagcatttgctaaagtaacatctgtaggttttggtttccacctatttaaagtcagatttatagactcgaggagacagaaactgaatcccacacctggtgcaattagaagcataattagaagcagaagaacaaaatgccacgtaaccaaagcatcagagccatcattgcacgtgtctttttttcttttttcttttttttttttcaagacagggtctcgctcttttgcccaggatggagtacagtggcatggtcaaggctcactgcagcttcaatcttctgggctcaagtaatccttccacctcagcctcccatatagctggaactacagttgtgcactaccacacccagctaattttttgatttcttgtggagatgaggtctcagtatgttcccaggctagtgttgaactcctgagctcaagaaatcctcctgcctgagtctctgaaagtgctgggattacaggcgtgagccaccacacatggcctattgcacaagtcttgacaaacaacatatattttctaaaactatccagatttcattatcagggaaaagtttgcttaggtttattacagcagtccttggcatttgtatggtaatttgtactttacaaatactttgatatattataactctattggtctttgaaacaaagcgatacagtgtaggtggtatcattctctttctcactcagtgtggcccagagttgctcagaattggagcagagcctgagacgtatctgcagatcctgtcatcagctggcaagtccaggagactgtgtcatttagagactgtgttgttagttatccctcaacatcttctaaggtggcaggaaataatattggaaataacattttaaagtaaaaattttaaagtttaaagaagagttttgccacttaaacaggggagctttgtctggaaaatacactgagttgaaacacttcatccttggaaggattatataagatgaacagttgtgataaatgtgtagattagagggatgtgaatgggcagttagtccagtgccctcatttaagaggccaagatcctgattcagaggaggcatcctttgcccagagctgcttagctaatctgaccaaatgttgggaaaaatgtctcacctaacccactattccttaattatggattttgtgaaaaacaatagaacatgttaatgagtaatttatattagttcgatgtattacaattttttagctttaaattacagttttcttataatgttgaaatgttttagaatcctttgaatctaagtatttgtttcctaaatgaaacatttgtacaacatttgatgtttttacttatgaaatattctcctcccccaagaaaatttaaactttttctctctatttaaaagctaagaaatgttttaaaggaaaaatgaaattatcttcctttagcttatttttaaggtaaaacagctttttactctgttattgtggtaatggacagaatattacatacaaaaatattctgggagagctttttcctagttggttttaaatcattgtgccacctgaaaggtttttagattttataggagctaatttgtccaccagcattaatgtaacacagtgtagttatgaaaatatattgaaggacaggaagtggacacgaagtgatttttgtaacctgagcagttaatgaatgtgccaacattttctaggaagggacagcaagaatattctgctctgtagttaaaatactggctggcttttgatgtcttcatgcttaattgtgatcactttcttgcactgtgatgtttttacgtgaatatgttgaagtagaagtctaccatattattttataaaatgttttctgtatggcaataaactgaaaacatggatcaacccttcttttgaaaataaactgagtcaatttagccttttaaaaatatagtcatctcttttaaatagaatcctcttccaccatcaaggctcaacattttgtaagcatccaaaaaattggtaattagggggcttgcactaaatttcactatcttcagtagagaggaactgtttggaacttagatttccaatgtgtatattctaatggagaaagcaagaggtagagtttgtatgtttgacttaccttagatttttattttccatacatactgcaaatgattgacttgttgcataaatgaagatcttctgttgtgtgcttttcaaacactgtaaataaatttgaaatttgaa

SEQ ID NO: 173 - DNA, 2287 bp, Homo Sapiens
aaacggatcgcgttgggtgaaggtgacggcgtcgagccattgacttccaaagactcctggcacatgaggaagaaacccagaagaggagagcaaaggagtcaggaatggcttttactcagttgacattcagggacgtggccatcgaattctctcaagatgagtggaaatgcctgaactctacacagaggactttatacagggatgtgatgttggagaactacaggaacctggtctccctggatctgtctcgtaactgtgtaatcaaggaactagcaccacaacaggaaggtaacccaggagaagtattccacacagtgacattggaacaacatgaaaaacatgacattgaagagttttgcttcagggaaatcaagaaaaaaatacacgactttgactgtcagtggagagatgatgaaagaaattgcaacaaagtgactacggccccaaaagaaaatcttacttgtaggagagaccaacgcgatagaagaggtataggaaacaagtctattaaacatcagcttggattaagctttctaccacatccccatgaactgcagcagtttcaagctgaagggaaaatttatgaatgtaaccatgttgagaagtctgtcaaccatggttcctcagtttcaccaccccaaataatttcttctaccatcaaaacccatgtttctaataaatatgggactgatttcatctgttcttcattactcacacaagaacagaaatcatgcattagggaaaaaccttacagatatattgagtgcgacaaagccttgaatcatggctcacacatgactgtacgtcaggtaagtcattctggagagaaaggatataaatgtgatctgtgtggcaaggtctttagtcaaaaatcaaaccttgcgcgtcattggagagttcatactggagagaaaccatacaaatgtaatgaatgtgacagaagtttcagtcgcaactcatgccttgcactacatcggagagttcacactggagagaaaccttacaaatgttatgagtgtgacaaggtcttcagtcgaaattcatgccttgcactacatcagaaaactcatattggagagaaaccttacacatgtaaagagtgtggcaaagcctttagtgtgaggtcaacacttaccaaccatcaggtaattcatagtggcaagaaaccttacaaatgcaatgaatgtggcaaggtgttcagtcagacttcaagccttgcaactcatcagagaattcacactggggagaaaccatacaagtgtaatgaatgtggtaaagtcttcagtcagacttcaagccttgcaaggcattggagaattcatactggagagaaaccttacaaatgcaatgaatgtggtaaggttttcagttacaattcacaccttgcgagtcatcggagagttcatactggagagaaaccttacaagtgtaatgagtgtgggaaagcctttagtgtgcattcgaacttaactacccatcaggtcatccatactggagagaagccttacaaatgtaatcaatgtggcaaaggcttcagtgtgcattcaagcctaactacccatcaggtcatccatactggagaaaaaccttacaaatgtaatgagtgtggcaaatcctttagtgtgcgcccaaacctcactagacatcagataatccatactggaaagaaaccttacaaatgtagtgattgtgggaagtcctttagtgtgcgcccaaacctcttcagacatcaaattatccatactaaggagaaaccttataaaagaaattaatatggcaaggtcttcagtcaaagtttaaatcctgtgagtcatcaaagaatttatatcagagagaaaccatacaagtataataaatgtggcaaggttttcagtcacaattcactcctacacagcatcagagaatttcattcttgagagaatccttacgagtacagcaaacccttcatcacaagttcaagcattcattgacatcagagtccatgctaaagagaaatcatatacacctaactgtgtggcagaggcttcatttaggtctcacaactcactagacatcaaaatgtgtaaacatctttgtatattttgtgcatgttgaagctattaaccaaggatcaaaactgtaacacatccaaggatttatgtgaggaataattcagtctagttgtgctgataaacttttcatattacacattgtagaacaaatgcaagcccaaatatgttaaaactcacacaacatgatatatattaaaggttgcaggatgtttgaagtcaaaaaaaaaaaaaaaaaa

SEQ ID NO: 174 - DNA, 5583 bp, Homo Sapiens
ataatctatcccagatcctttcccagagagaaacttggcgatcacgttttcacatgatgctcacgctcagggcgcttcaattatccctccccacaaagataggtggcgcgtgtttcagggtctctcgtctctctcctacagaaaagaaaaagaaaaaaatgtcattagaagaggcgtaacacgtcagtccgtccccaggtttgtgtttcctggagtggccgaaagagatcagttctaacctgctctgcaggaataacggtcctgcctcccgacactcttggcgaggtttttgtacagtttgctccgggagctgtttcttcgcttccacctttttctcccccacacttcgcggcttcttcatgctttttcttctcaccatttctggccaaaactacaaacaagacttcgcagatcgagcctgcgtgctgccgaagcagggcgccgagtccatgcgaactgccatctgatccgctcttatcaatgaagcagccgatcatggcggatggcccccggtgcaagaggcgcaaacaagccaatcccaggaggaaaaacgtggtgaactatgacaatgtagtggacacaggttctgaaacagatgaggaagacaagcttcatattgctgaggatgacggtattgccaaccctctggaccaggagacgagtccagctagtgtgcccaaccatgagtcctccccacacgtgagccaagctctgttgccaagagaggaagaggaagatgaaataagggagggtggagtggaacacccctggcacaacaacgagattctacaagcctctgtagatggtccagaagaaatgaaggaagactatgacactatggggccagaagccacgatccagaccgcaattaacaatggtacagtgaagaatgcaaattgcacatcagattttgaggaatactttgccaaaagaaaactggaggaacgcgatggtcatgcagtcagcatcgaggagtaccttcagcgcagtgacacagccattatttacccagaagcccctgaggagctgtctcgccttggcacgccagaggccaatgggcaagaagaaaatgacctgccacctggaactccagatgcttttgcccaactgctgacctgcccctactgcgaccggggctacaagcgcttgacatcactgaaggagcacatcaagtaccgccacgagaagaatgaagagaacttttcctgccctctctgtagctacacgtttgcctaccgcacccagctcgagcggcatatggtgacacacaagccagggacagatcagcaccaaatgctaacccaaggagcaggtaatcgcaagttcaaatgcacagagtgtggcaaggccttcaaatataaacaccatctgaaagaacacctgcgaattcacagtggtgaaaaaccttacgagtgcccaaactgcaagaaacgtttctcccattctggttcctacagttcgcacatcagcagcaagaaatgtattggtttaatctctgtaaatggccgaatgagaaacaatatcaagacgggttcttcccctaattctgtttcttcttctcctactaattcagccattacccagttaagaaacaagttggagaatggaaaaccacttagtatgtctgaacagacaggcttacttaaaattaaaacagaaccactagacttcaatgactataaagttcttatggctacacacgggtttagtggcactagtccctttatgaatggtgggcttggagccaccagccctttaggagttcatccatctgctcagagtccaatgcagcacttaggtgtagggatggaagcccctttacttgggtttcccaccatgaatagtaatttaagtgaggtacaaaaggttctacagattgtggacaatactgtttccaggcaaaaaatggactgcaaggctgaagaaatttcaaagttgaaaggttatcacatgaaggatccatgctctcaacctgaggaacaaggagttacttctcctaatattccgcctgtcggtcttccggtagtgagtcataatggtgccactaaaagtattattgactatacgttggaaaaagtcaatgaagccaaagcttgcctccagagcttgactactgactcaaggagacagatcagtaatataaagaaagagaagctacgtactttaatagatttggtcactgatgacaaaatgattgagaaccacaacatatccactccattttcatgccagttctgtaaagaaagttttcctggccccatccctttgcatcagcatgaacgttacctttgtaagatgaatgaagagatcaaggcggtcctgcagcctcatgaaaacatagtccccaacaaagccggagtttttgttgataataaagccctcctcttgtcatctgtactttctgagaaaggaatgacaagccccatcaacccatacaaggaccacatgtctgtactcaaagcatactatgctatgaacatggagcccaactccgatgaactgctgaaaatttccattgctgtgggccttcctcaggaatttgtgaaggaatggtttgaacaacgaaaagtctaccagtactcaaattccaggtccccatccctggaaagaagctccaagccgttagctcccaacagtaaccctcccacaaaagactctttattacccaggtctcctgtaaaacctatggactccataacatcaccatctatagcagaactccacaacagtgttacgaattgtgatcctcctctcaggctaacaaaaccttcccattttaccaatattaaaccagttgaaaaattggaccactccaggagtaatactccttctcccttaaatctttcctccacatcttctaaaaactcccacagtagttcatacactccaaacagcttctcttctgaggagctccaggctgagcctttagacttgtcattaccaaaacaaatgaaagaacccaaaagtattatagccacaaagaacaaaacaaaagctagtagcatcagtttagatcataacagtgtttcttcctcatctgaaaactcagatgagcctctgaacttgacttttatcaagaaggaattttcaaattcaaataatctggacaacaaaagcactaacccagtgttcagcatgaacccatttagtgccaaacctttatacacagctcttccacctcaaagcgcatttccccctgctactttcatgccaccagtccagaccagtattcctgggctacgaccatacccaggactggatcagatgagcttcctaccacatatggcctacacctacccaactggagcagctacttttgctgatatgcagcaaaggagaaagtaccagcggaaacaaggatttcagggagaattgcttgatggagcacaagactacatgtcaggcctagatgatatgacagactccgactcctgtctgtctcgcaaaaagatcaagaagacagagagtggcatgtatgcatgtgacttatgtgacaagacattccagaaaagcagttcccttctgcgacataaatacgaacacacaggaaaaagaccacatcagtgtcagatttgtaagaaagcgtttaaacacaagcaccaccttatcgagcactcaaggcttcactcgggcgagaagccctatcagtgtgataaatgtggcaagcgcttctcacactcgggctcgtactcgcagcacatgaatcacaggtattcctactgcaagcgggaggcggaggagcgggaagcggcggagcgcgaggcgcgcgagaaagggcacttggaacccaccgagctgctgatgaaccgggcttacttgcagagcattacccctcaggggtactctgactcggaggagagggagagtatgccgagggatggcgagagcgagaaggagcacgagaaagaaggcgaggatggctacgggaagctgggcagacaggatggcgacgaggagttcgaggaggaagaggaagaaagtgaaaataaaagtatggatacggatcccgaaacgatacgagatgaagaagagactggagatcactccatggacgatagttcggaggatgggaaaatggaaaccaaatcagaccacgaggaagacaatatggaagatggcatgtaataaactactgcattttaagcttcctatttttttttccagtagtattgttacctgcttgaaaacactgctgtgttaagctgttcatgcacgtgcctgacgcttccaggaagctgtagagagggacagaaggggcggttcagccaagacagatgtagacggagttggagctgggtattgttaaaaactgcattatgcaaaaattttgtacagtgttaaggcctaaaaactgtgtggttcagagactaattcctgtgtttaatagcatttatactttaagcacaactagaaaattgtaagaattgcactctacttatgtatcactacaaactttaaaaaactatgtctaatttatattaatacattttaaaaaggtgcccgcactaccatacatcagtatttttattattattattgttattcctttttaatttaatgtgctcgcactacaatgcatcagtattatgattcctctgtactttcctttcgctattcatcaatttcccattttttttttcagcttaagtaaccacacaattttaggcctcaatttttttttttttctgtgaaggaacttgaagtgatgcatgtgtgaatttaagataccgaagtcttaaagtgacctggacgtgaaggaaaaagtaagatgagaaataaagaaagcctttgtaaggtggttttaaaagccttatatgcaaaccttttaatctgtgtttctgcaagtgccatccttgtacagtgttaagagggtaacatgggttacctttgcaccagcttcagtgttaagctcaccctgttctttgaagcacccatgtcagtattagaagaataggcagcagttccttagtttacatatgtttgtgcaattattttctgtacttttttgttcattaattttgtcagtattacaccaaactgtttttgcaacaaaaaaattttttttgcattcatttaattttaggtcaaataacattttatttatgtggctcattttatatttcctaattttatttatttcatactgtagtgtacagtattatagttcttcaatatatagatatattttagtaaaaaaggaacatgacgttgatcatttgggcaaattttacgtaaagagaagagcatttattgtgttttggaacattaattgtgagatgggatttttcaattttattattttatttttgtttttttccaattactggaaattccaaatttgggaacttttgatacgatcttgtgaaaacactgtattttcgactgaaaattccactttcttcatcttgttttttagctaaaaagagggactgttaaatacaatgtatgataccatgacaaaaatctttcctgaattgtctttgtaaaagtattattgaattttcaatttgtaatttcttttgaaaatgaccatgctcgaataaaaatgtagccaaactaaaaaaaaaaaaaaaaaaaaaaaaa

SEQ ID NO: 175 - DNA, 987 bp, Homo Sapiens
aatataagtggaggcgtcgcgctggcgggcattcctgaagctgacagcattcgggccgagatgtctcgctccgtggccttagctgtgctcgcgctactctctctttctggcctggaggctatccagcgtactccaaagattcaggtttactcacgtcatccagcagagaatggaaagtcaaatttcctgaattgctatgtgtctgggtttcatccatccgacattgaagttgacttactgaagaatggagagagaattgaaaaagtggagcattcagacttgtctttcagcaaggactggtctttctatctcttgtactacactgaattcacccccactgaaaaagatgagtatgcctgccgtgtgaaccatgtgactttgtcacagcccaagatagttaagtgggatcgagacatgtaagcagcatcatggaggtttgaagatgccgcatttggattggatgaattccaaattctgcttgcttgctttttaatattgatatgcttatacacttacactttatgcacaaaatgtagggttataataatgttaacatggacatgatcttctttataattctactttgagtgctgtctccatgtttgatgtatctgagcaggttgctccacaggtagctctaggagggctggcaacttagaggtggggagcagagaattctcttatccaacatcaacatcttggtcagatttgaactcttcaatctcttgcactcaaagcttgttaagatagttaagcgtgcataagttaacttccaatttacatactctgcttagaatttgggggaaaatttagaaatataattgacaggattattggaaatttgttataatgaatgaaacattttgtcatataagattcatatttacttcttatacatttgataaagtaaggcatggttgtggttaatctggtttatttttgttccacaagttaaataaatcataaaacttgatgtgttatctctta

SEQ ID NO: 176 - DNA, 5480 bp, Homo Sapiens
tatatccgtggtttcctgctacctccaaccatgggccttttgggaatactttgttttttaatcttcctggggaaaacctggggacaggagcaaacatatgtcatttcagcaccaaaaatattccgtgttggagcatctgaaaatattgtgattcaagtttatggatacactgaagcatttgatgcaacaatctctattaaaagttatcctgataaaaaatttagttactcctcaggccatgttcatttatcctcagagaataaattccaaaactctgcaatcttaacaatacaaccaaaacaattgcctggaggacaaaacccagtttcttatgtgtatttggaagttgtatcaaagcatttttcaaaatcaaaaagaatgccaataacctatgacaatggatttctcttcattcatacagacaaacctgtttatactccagaccagtcagtaaaagttagagtttattcgttgaatgacgacttgaagccagccaaaagagaaactgtcttaactttcatagatcctgaaggatcagaagttgacatggtagaagaaattgatcatattggaattatctcttttcctgacttcaagattccgtctaatcctagatatggtatgtggacgatcaaggctaaatataaagaggacttttcaacaactggaaccgcatattttgaagttaaagaatatgtcttgccacatttttctgtctcaatcgagccagaatataatttcattggttacaagaactttaagaattttgaaattactataaaagcaagatatttttataataaagtagtcactgaggctgacgtttatatcacatttggaataagagaagacttaaaagatgatcaaaaagaaatgatgcaaacagcaatgcaaaacacaatgttgataaatggaattgctcaagtcacatttgattctgaaacagcagtcaaagaactgtcatactacagtttagaagatttaaacaacaagtacctttatattgctgtaacagtcatagagtctacaggtggattttctgaagaggcagaaatacctggcatcaaatatgtcctctctccctacaaactgaatttggttgctactcctcttttcctgaagcctgggattccatatcccatcaaggtgcaggttaaagattcgcttgaccagttggtaggaggagtcccagtaacactgaatgcacaaacaattgatgtaaaccaagagacatctgacttggatccaagcaaaagtgtaacacgtgttgatgatggagtagcttcctttgtgcttaatctcccatctggagtgacggtgctggagtttaatgtcaaaactgatgctccagatcttccagaagaaaatcaggccagggaaggttaccgagcaatagcatactcatctctcagccaaagttacctttatattgattggactgataaccataaggctttgctagtgggagaacatctgaatattattgttacccccaaaagcccatatattgacaaaataactcactataattacttgattttatccaagggcaaaattatccactttggcacgagggagaaattttcagatgcatcttatcaaagtataaacattccagtaacacagaacatggttccttcatcccgacttctggtctattacatcgtcacaggagaacagacagcagaattagtgtctgattcagtctggttaaatattgaagaaaaatgtggcaaccagctccaggttcatctgtctcctgatgcagatgcatattctccaggccaaactgtgtctcttaatatggcaactggaatggattcctgggtggcattagcagcagtggacagtgctgtgtatggagtccaaagaggagccaaaaagcccttggaaagagtatttcaattcttagagaagagtgatctgggctgtggggcaggtggtggcctcaacaatgccaatgtgttccacctagctggacttaccttcctcactaatgcaaatgcagatgactcccaagaaaatgatgaaccttgtaaagaaattctcaggccaagaagaacgctgcaaaagaagatagaagaaatagctgctaaatataaacattcagtagtgaagaaatgttgttacgatggagcctgcgttaataatgatgaaacctgtgagcagcgagctgcacggattagtttagggccaagatgcatcaaagctttcactgaatgttgtgtcgtcgcaagccagctccgtgctaatatctctcataaagacatgcaattgggaaggctacacatgaagaccctgttaccagtaagcaagccagaaattcggagttattttccagaaagctggttgtgggaagttcatcttgttcccagaagaaaacagttgcagtttgccctacctgattctctaaccacctgggaaattcaaggcgttggcatttcaaacactggtatatgtgttgctgatactgtcaaggcaaaggtgttcaaagatgtcttcctggaaatgaatataccatattctgttgtacgaggagaacagatccaattgaaaggaactgtttacaactataggacttctgggatgcagttctgtgttaaaatgtctgctgtggagggaatctgcacttcggaaagcccagtcattgatcatcagggcacaaagtcctccaaatgtgtgcgccagaaagtagagggctcctccagtcacttggtgacattcactgtgcttcctctggaaattggccttcacaacatcaatttttcactggagacttggtttggaaaagaaatcttagtaaaaacattacgagtggtgccagaaggtgtcaaaagggaaagctattctggtgttactttggatcctaggggtatttatggtaccattagcagacgaaaggagttcccatacaggatacccttagatttggtccccaaaacagaaatcaaaaggattttgagtgtaaaaggactgcttgtaggtgagatcttgtctgcagttctaagtcaggaaggcatcaatatcctaacccacctccccaaagggagtgcagaggcggagctgatgagcgttgtcccagtattctatgtttttcactacctggaaacaggaaatcattggaacatttttcattctgacccattaattgaaaagcagaaactgaagaaaaaattaaaagaagggatgttgagcattatgtcctacagaaatgctgactactcttacagtgtgtggaagggtggaagtgctagcacttggttaacagcttttgctttaagagtacttggacaagtaaataaatacgtagagcagaaccaaaattcaatttgtaattctttattgtggctagttgagaattatcaattagataatggatctttcaaggaaaattcacagtatcaaccaataaaattacagggtaccttgcctgttgaagcccgagagaacagcttatatcttacagcctttactgtgattggaattagaaaggctttcgatatatgccccctggtgaaaatcgacacagctctaattaaagctgacaactttctgcttgaaaatacactgccagcccagagcacctttacattggccatttctgcgtatgctctttccctgggagataaaactcacccacagtttcgttcaattgtttcagctttgaagagagaagctttggttaaaggtaatccacccatttatcgtttttggaaagacaatcttcagcataaagacagctctgtacctaacactggtacggcacgtatggtagaaacaactgcctatgctttactcaccagtctgaacttgaaagatataaattatgttaacccagtcatcaaatggctatcagaagagcagaggtatggaggtggcttttattcaacccaggacacaatcaatgccattgagggcctgacggaatattcactcctggttaaacaactccgcttgagtatggacatcgatgtttcttacaagcataaaggtgccttacataattataaaatgacagacaagaatttccttgggaggccagtagaggtgcttctcaatgatgacctcattgtcagtacaggatttggcagtggcttggctacagtacatgtaacaactgtagttcacaaaaccagtacctctgaggaagtttgcagcttttatttgaaaatcgatactcaggatattgaagcatcccactacagaggctacggaaactctgattacaaacgcatagtagcatgtgccagctacaagcccagcagggaagaatcatcatctggatcctctcatgcggtgatggacatctccttgcctactggaatcagtgcaaatgaagaagacttaaaagcccttgtggaaggggtggatcaactattcactgattaccaaatcaaagatggacatgttattctgcaactgaattcgattccctccagtgatttcctttgtgtacgattccggatatttgaactctttgaagttgggtttctcagtcctgccactttcacagtgtacgaataccacagaccagataaacagtgtaccatgttttatagcacttccaatatcaaaattcagaaagtctgtgaaggagccgcgtgcaagtgtgtagaagctgattgtgggcaaatgcaggaagaattggatctgacaatctctgcagagacaagaaaacaaacagcatgtaaaccagagattgcatatgcttataaagttagcatcacatccatcactgtagaaaatgtttttgtcaagtacaaggcaacccttctggatatctacaaaactggggaagctgttgctgagaaagactctgagattaccttcattaaaaaggtaacctgtactaacgctgagctggtaaaaggaagacagtacttaattatgggtaaagaagccctccagataaaatacaatttcagtttcaggtacatctaccctttagattccttgacctggattgaatactggcctagagacacaacatgttcatcgtgtcaagcatttttagctaatttagatgaatttgccgaagatatctttttaaatggatgctaaaattcctgaagttcagctgcatacagtttgcacttatggactcctgttgttgaagttcgtttttttgttttcttctttttttaaacattcatagctggtcttatttgtaaagctcactttacttagaattagtggcacttgcttttattagagaatgatttcaaatgctgtaactttctgaaataacatggccttggagggcatgaagacagatactcctccaaggttattggacaccggaaacaataaattggaacacctcctcaaacctaccactcaggaatgtttgctggggccgaaagaacagtccattgaaagggagtattacaaaaacatggcctttgcttgaaagaaaataccaaggaacaggaaactgatcattaaagcctgagtttgctttcaaaaaaaaaaaaaaaaaa

SEQ ID NO: 177 - DNA, 4084 bp, Homo Sapiens
gaggtgcgaccgggtcccggcctgagtcgcggccacccgcaggtctgagctgtgggctgaggcagcgcagccgctgccgcagggtgcgcgatgccttgaacctgggaaactatgtgaagcaacactctggattttgaaagacatcttttcatcatgggacagcaaatttcggatcagacacagttggttattaacaagttaccagaaaaagtagcaaaacatgttacgttggttcgagagagtggctccttaacttatgaagaatttcttgggagagtagctgagcttaatgatgtaacggctaaagtggcttctggccaggaaaaacatcttctctttgaggtacaacctgggtctgattcctctgctttttggaaagtggttgtacgggtggtctgtaccaagattaacaaaagcagtggcattgtggaggcatcacggatcatgaatttataccagtttattcaactttataaagatatcacaagtcaagcagcaggagtattggcacagagctccacctctgaagaacctgatgaaaactcatcctctgtaacatcttgtcaggctagtctttggatgggaagggtgaagcagctgaccgatgaggaggagtgttgtatctgtatggatgggcgggctgacctcatcctgccttgtgctcacagcttttgtcagaagtgtattgataaatggagtgatcgacacaggaattgccctatttgtcgcctacagatgactggagcaaatgaatcttgggtggtatcagatgcacccactgaagatgatatggctaactatattcttaacatggctgatgaggcaggccagccccacaggccatgaccttgaagtgaaagtcttctgttgctattgtgggctcaaatatttggtcatgggggaagaatgtagggttgtggcactggcacagacacaggaaaatccattttccccactcttttatttttgctattctgatcatttgtcccccttttaaaaataaacttcccatgtcttccatttgtggtactaaaatttgctactgttttagaccatattttcctattatttatctgttcaaatttgtattattacaactaatagctcttgaattctttgctaaaggtaacagcaacacttccagaggcttctaaaacactactgttttgcagggcaggagtattctggaatctttttacttagatataaaataaacctcgaatattaaaaagttgtagccatctgagagaggaaagtttaagtgactgaaaatgtagaatacttcaacgtgcatgttactacttaaaactagtctttctgctggaatctaaggagtatatatatatatgcccccttgtggttaattattgctcctttaataatttttacttgaaatgatccacaattatttcataactttagcagtgtgttttggaactactgtacttaaaggtttgtttgtttgtttttgccatactgtataatttgggtgaggtctacaaaattgggtgtgactttcctttgcaaatggatttctcctggggaattttcttggctgttctggaaatgctttcccacagctgggtaactgttctaaatggctttgataatgctcacacatcttggagtttcagaaggaaattattctgcatcacaaatactaaattttatatttctaaattactataggtcatttaatattggtttatggtgcttttatttccttaacttgaaaacatctttctgagatttcagagtcctcaaatttcttagattaagagacaagaggccagtgcagtggttcacacctgtaatcccagcactttgggaggccgaggtgggtggatcatttgaggttaggagtttgagaccagcctggccaacatggcgaaatcctctctctactaaaatacaaaaattagctgggcatggtggcaggtgcctgtaatctcagctactcgggaggctgaggcagaattgcttgaacccaggaggtggaggttgcagtgagccgagatcacaccactgcactccagcctgggagacagaacgagactcctaatcaaaaaaaaaacacaagaaaatagagtgaggcttttttaccgtatatacataaaatacttatgaaaattagaagataatttggcattcctactgtttcactgtacttccattgaaatactctttccattaaaatattctgaaacaatatagtaataatggaattgtgatcttcagttgcacctcaaccattttttttgcttatgaactaaaatttctaacattaacatttcggcatgtaataaaacaagggcctatctcctttaaaatttaacattccatgtaacttttctgacttatcattcataagttgcaaatattactattttcctaaaccagggtacacaatttaagttgccacttattgatgacagaatttctggatagtaggattttaataggcgagcaaataaaattcaaatcaatttcaaggaaaaacatctggccaggggtagcttgatttcgcccccaaaaatactgaagactaatccattgacattcataatgggacagctaagtaccaaatagctaactactccctatggaggtttatgcaagcagagtaccaggggttccatcatatcaacctggcaatgcacttggtggttgtgtgaccttgagaaagtctcttactcttgtttatgtgttcttactttagaaactgagactttatttgtggttttcacactatttcagcagcaaaaactttttcaaggaaaatcttacagaacctttaaacacgtgtgcatacacacataccctataccccactatataaaagtcatattattataaatttccttattatataaactttatatactataaatgtgattaagtcaatgaataaaaacattaatgcattggtgatatccagcatgtttgaatttggtgagtaacacacatatagtgggagtcgttttttttaaaaaaattttttaattaaattcaagtcaaatttgcagaaccctgtatctcctccatagattcttagtattccatggaacatattttgaaaaccttgggatagatgatccactgaaatcttttccagctctaagattttaaattgtccttttagattagacttgctgagtttaattcagattacctaattttaaaatgtttctgaaaagtgaacagagttaccttacagagttttggatctttccagggatagccaatgattttatcccccagaatccttcacctttcaaggagttatttaacaatgagcccagtgactcaatagggcccaaacctttttattttacaatatgagctccaagacacttactgatctactgtgaatataaaatgttattagccttatcaaataaataaatgagcacagctctttgttcgctctattgaactgggtgataattatttagatgtgaatgttaggtcagttctactgtaataactaatcgtaaaagttgtaaatttgtttaatggatgaaatgtacactttttgtattctgtacagctttgtcttttttaaatatgaagtacttaaatgtacttactatgataggaaatataatgtgtgccttctaggatttgtgaagtggtttcatgaactctaaggaatttgttttccctatcctaactcagtaacagagggtttactccgattatgtatagaaccttagtttgagaaaatgaattttactatgtactgaatttagaggttgagaataataggatctgtgttattcttagtacccactgataaattgtgcaataaataatctttcgcaagtgattttagctaattgaagagattattttcctatgtaatttcacattctaatatactaaatgtttatattccttagagaactattttatattgtgcgctgggggcttgtgatgtttgtgtgctgttttaaaattcatttcaaattggactcgatttccttatatctaatatatatctgggagaaaaggctgcttgaaaatatcttttgattcagtgatttttaacattgggaagttgagtttattaaaaggtagtctg

SEQ ID NO: 178 - DNA, 5755 bp, Homo Sapiens
gagcctcccgcgtgcccggcctctgtgcgcgctcgcgccccgcccgcgcagccgcttctccccgcgcgggctctcggcaggcgggaggcggcagggctggcattgcagtgcgggccgtgcgggctgcgcgggcgcggggaggcgcgggcggcaaactgcgggcacccggcaccccgcagccagtaccgggcggaggcgtcagagccgcgcaccgcggacgagcaggcccaggcatccagtaccctgctgactctgacatgcccccagcctcccccagctctgcagggagccctggtgccagagaccttctcccatttctccctatgggtgcctgacctgagggcagagacatctgagtgtgtataagcacagcaggacaccaggacctggcctgaagacatttcctctcctcccctctggatttctcagagactgttctgcgatgaccacaacaaggtaccggcccacctgggacctggccctcgacccgctggtgtcttgcaagctctgtcttggggagtacccagtggagcagatgacaaccatagcccagtgccaatgcatcttctgtactctgtgcctgaaacagtatgttgagctcttgatcaaagaaggattagaaaccgcaattagctgcccagatgctgcctgccctaaacagggccacctacaggagaacgagattgagtgcatggttgcagctgaaattatgcaaagatataaaaagctacaatttgaaagagaggtgctgtttgatccctgtcggacttggtgcccggcgtccacctgccaagctgtgtgtcagctccaggacgtggggctgcagaccccccagccagtgcagtgcaaagcctgccgtatggaattctgctccacctgcaaagccagctggcaccctggccagggctgcccggagaccatgccgatcaccttcctccccggggagaccagtgctgctttcaaaatggaagaagatgacgcgcccatcaagcgctgccccaagtgcaaagtctacatcgagcgagacgaaggctgcgcgcagatgatgtgcaagaactgcaagcacgccttctgctggtactgcctggagtctctggacgatgatttccttctgatacactacgataagggaccctgccggaacaagctgggccactcccgggcatctgtgatctggcatcggacacaggttgtgggcatttttgcaggatttgggctgctgctcttggtggcctcacctttcctactcctggccactccctttgtactttgctgcaagtgcaagtgcagtaaaggtgacgacgacccgttacccacctagaggaagcgcgatgctggaacacatccctgcctccgggaagtgtggctctcccccaaccctccccaccgtccccccttcactaaacatctttcttgccttatgtgccccattgagcttcacagtgtcaggctggacgccgtgatttcagggacctatgtcacaatgttcgctgaggccccaggtgtggtggggaggggaggcaggtgtgggtagcgcacatccccacagatcaatctctgcagatgacagggaggtgctgtgagaagtgcaccaggcagctttctctctgtggtagactaggcatgtctggggatggcctaagagactttctgctccttggcttctagatggcaccatgttgtcagagaagtcttttaaggactgccactctcttcagacagaatctgattattccagcttgagagaagcactctgtttatgacaactgtttttattactaatggcatttagtaaaatcctttttagaaggtattttttttccaactgagtagtgaaaatcaacaaggtgcatataaaccatcctatgcctttcttgaaatgtgcattttaagaagttatagttaaacgacttttcaggagatttagaaagccttatgcactctttgtgtttttcttgaaacttgctgtagtaactttttgaacgctgtaagctgtgtactgttataagtgtgcttcctatattgttgcatttccttgataatattgacgtgtttaaaggaacatctcatctccattagatttgccttttgttgttttctctctttggtgattcagctcagctcatgggcctcatcccttctctcccaggtagcagaaaacgctttttattgtattcaatcccactgctttgctcggcaatggttctcctccgaattgctgccgtctggcctctggcctcagtcttcagatagacagtaagaagaaagcagcctcattgatccgcagatgtaggggcctcttggcagaggctggaggactctgggggctagggaagagcctgccagattttcacatttttaaaatgttctagtcattttgagaaatcatatatcttacacagttccaagtcctgttgctaaccgttttgctcttgttggggaaaagaacctcccatttcacttcgttttaacgtggggattttaccacttgatcttttacagggctgtctgtgaccatttccatggcagcaggatgcagggattaataaggacacatacacattattccaccaattgactttgaaaagtggagaaagtgtattctttaaagagaatttacttctaaaagccacaggtgcttttacaaagcaaactgcattgaatttaaaacttctaaaaataacaggcaaatattgtagctatattacagtgggattttaaaaatcttgttaaacattctataaagaagtaaaacaaaatccttttatctcagttatttgcccatcacaagcacatttttaaaatgttgctttgtgtgtgtttgacttctgcatttgagtatcagtctcaggtcctagtttactttccctggttggaaatttatttcttatttcctaacattgaattcgttagaaaaaacagcgtcacctcactcttcacctgtcatgttgattttccttatgaacccgaagccatttagaaaatccctgtgtgtcaaaattacattcaaaaagctctccttgtaattgcaagtttagtaactcagtaagaacatgcctgcgactccctttctggatggaacctgggctgtggctctctgtcgtttgtggtgctgtgatggtgtctactgttagaatagcttttctggaggtgggtggcaactccacgcgggagtcattggctgggcttgagccctcagcctgtgatatgtggatgcagctgtccagccactgccctttaacatgcccagcacacatgggaggcctgtggccctgtgtccagtggcccacaggacacgcctccaccatatgctcatccttcctgcctgaaattgctgctgcccatcgcatgagcccacacagtagcacccccgtccttaggatgagagtcagagcctttggaaaggctgcatccccagggctagagctcagatgaccttatttctagagggacaggctgttctgttggaagagtctctggcccagtcatgcacatctgtagccccagccatccttgtgccttcacctctgatgtgtttcacaagcacgtagttcaacccagatagggaccacagagattctggggccagccaggggcagtcaaattggcacctactggctctgactttttgtatgaagcatgcctcagtttcctcattttgatctagatataaaattaaaattgtccatttcctatataaataccagcaagatcactctgagatacataaactcgcatttccttctgttttagtaaggagtgccagacttatctttgatgggaatacagtatgaaccctgcttgatgtaaaatggaaatagcacacaggcagatggccctgggtttggactttgatcttgccatcattccccagtaaaacctggggagttctgcgttgagtggacggacttattcctgtgaagcggcataatttgtctccattgaaaaatggcattcactcttacagatggtgttcactgcaagccccagaagcatatggcatgtgttcactaagaggcctttaatcctggggagtaaggggcgaaggcccttagacaaccatggctgctgtactgccgcccagggtgggtggccagtgaggactggccttagcccagtggacctgtggcttctctgaggcccttgagtaactgaccacatttggaggttttgctggaaatgcctgacctctcagtctggctctgctgtgtagtccatagcccagccagatgagcttgcagcctcataggaggtcagcaccttgcaaagatgcagtcaccatagatgtccacgtagcagagactgacttaggatctgagataaagcatcggattgcaggaataactgtccaaattagttcttcctcctcaactcataggagtagctgtggacagaggaaccaacatctgccacctctggcattttctttctttttttttctttttgagacggagtttcgcttttgtcccccaagctggagtacaatgacaggatctcggctcactgcaagctctgcctcccgggttcaagcgattctcctgcctcagcctcccaagtagctgggattacaggcacccaccacctcacccagctaatttttgtattttcagtagagacggggtttcaccatgttggccaggctactctcaaactcctgacctcaggtgatctgcccacctcggcttcccaaagtgctggaattacaggcctgagccaccccacccggcctattttcttaaaggggaacaaatgatcttgacaacatattattccataaaaccagtttagggcacaggccagttcctgattagaacacaggacctgtgggagggactatcagagatgcaaaaattacttcaagatgagtttattgttttcatttgtattgcaaaagttagaagtcattttacaaattaaaaaaacatttttttcttggtagtctttaaaaattaggggattgaaaggatccaggatgggctttgtgtgtgtgtctcagattctcatttattagtgagcacacctgtgtatatatataaatcacaaggagatcatcaagggaaaacattttgcatgtgtaaagcttcatgaagttctctttaaaaaataccaaagcttgtttatttctgataattaacctaagcccttatgaaaataaacaaaatgaagggattatgacaggtattaccaaaaacaccaaaaggaacaaaggggcctgcgttaaaacctaattgctaatgcttcacaactaggagagcatgccgtcttgatgtttaaaaaacccagggtctccacccttcctttgatttgtgcaattctgtcttccacagttccggagccttcagtgaggggtagctacatgccccatgcctgccctttctttccttctttgctcactttactatgggtgtattttaatcttgtataaaaatatgcatgaatgagtcatgcacatgtatacgttatgtatttgacaagtggtggtgaaacaaaatcaaaacagatttgatttgtgtttttgaaatgtcagtacattttgtgccactaacactgtgatgtataaaagagctgtttgaatgccttttaatgttgtgttttgtactctggaatcatatggaaaaagtttgatttgtaatttcaatacatattttaaatgtattgtgtcttacgtagtttgtccccccctttagcagggattcctttttaaagctattttggctggaatacaggtgacttttgtaaaaaaaaaaaaaaaaaa

SEQ ID NO: 179 - DNA, 5765 bp, Homo Sapiens
atgggaaggagttggcccggcttgtctctctgtcagtggcggctgctgcctgctctggaggcaggctgggcggtggcggccgagactggcgggggtggacgcccgggccgggctgcgcccgcttcttgcagctgtgaattcctttggacaattgatgatatttatcattgtgcccagtttctacaaataaaagatgggtggattattttctcgatggaggacaaaaccttcaactgtagaagttctagaaagtatagataaggaaattcaagcattggaagaatttagggaaaaaaatcagagattacaaaaattatgggttggaagattaattctgtattcctcagttctctatctgtttacatgcttaattgtatatttgtggtatcttcctgatgaatttacagcaagacttgccatgacactcccattttttgcttttccattgatcatctggagcataagaacagtaattattttcttcttttccaagagaacagaaagaaataatgaagcattggatgatttaaaatcccagaggaaaaaaatacttgaagaagtcatggaaaaagaaacttacaagacggctaaattaattcttgaaaggtttgatccggactcaaagaaagcaaaggagtgtgagccgccatctgctggagcagctgtaactgcaagacctggacaagagattcgtcagcgaactgcagctcaaagaaacctttctccaacaccagcaagccctaaccagggccctcctccacaagttccagtatctcctggaccaccaaaggacagttctgcccctggtggacccccagaaaggactgttactccagccctatcatcaaatgtgttaccaagacatcttggatcccctgctacttcagtgcctggaatgggtcttcatcctccaggtccacctttagcaagacctattctcccccgagaacgaggtgctttggatagaattgttgaatatttggttggtgatggtccacaaaacaggtatgcacttatatgtcagcagtgtttttctcataatggcatggctttgaaggaagaatttgaatacattgcttttcgatgtgcctactgttttttcttgaaccctgcaagaaaaaccagacctcaggctccaagacttcctgagtttagttttgagaagaggcaggtggtggaaggttcaagttcagttggtcccttgccatcaggaagtgtgctttcatcagacaaccagtttaatgaagaatctttagaacacgatgttcttgatgataatacagagcagacagatgacaaaataccagctacagaacagacaaaccaagtgattgaaaaagcatctgactcagaggaaccagaggagaaacaagagactgagaatgaggaagcctcagtgattgaaaccaactccacagttcctggagctgattctattcctgatcctgaactaagtggagaatctttgacggcagagtagtaaatgcttccacgtgccttcaactggatatttatagtcttactgatgtcagttattgctttttcggtggcacttactttttttgcccctctaagggtatgcttgtgtatcatttgaattcagattgcctagctatttgaacatctcaaagttatatatactgggtattaaaattaaaagcaagttatatcagtgaagtaagatccttttgaatgtacaaagacccacactattgagacagcttttagatacttttttgtccattctaaaagtaagcaaacatgattgccttcttgttttctgtatgtataacccgtaaatatccattttgacataggaagaactttggttaagagtaagttctctaattgtgtttgttttaaggaatgaaacttggttaagattttgactacttcattattaaaaattgatagaattttagctcctgagatatttacaactgggagaaatgtctatttaggtgtttacattaagcggtatgaaagttgttaccacataggcactggtacgaattctcaataagaatgcagtggaacagttaagtagaactgtaactacgttggcactggtacgaattctcagtgagaatgcaatgaaacagtcaactgcagtgtttctttttgatgtcttttattttacaactgggccaaaggcacattatgtatataattagtttatatttacacactagcatataggaaatatttctgcacttgaccctatttgaattctgagcattatttataagtataaaatgatgatatataagtgaattttgtgctcttgtttgtattttattaaggaaaatgaaaataatctggcatcagtttcattttgctaaatatctagtcttcttcaaacagtatcttggtgggtgacttggctacctgaaaaatcttaggaggaatagctcacaatacaataaatctgtagattctgcttagagcaaattatggtacttttattcagacttgtttcctttctagttaacagaaatagtgacatttagaggttttaatcagaagttaggtttttctgattcaggaacatcgtaggccagccatttgtaatttttaactttgagaaacaaattttgtgagaataggtagtgggttgctggtagttaattggatttaatatttgtattaaggattaactggaaaaaatgtgtctcagtgctaattcttggacctttaatacagtgtgcttatctgttacggcctccttttatctctcttctccaatattaaaaaaaatggaaatcaaattattatgctgaagggaaaaatatacctgtataagaatggtgtgtttggctaatgtttctaagttgcacacagtttattaacaactgaacaaaacatttttatcatttaaaaatctatttttatgatttaatatctcatatgtgacagtttttttttttttttttttttggaactcaatctgttaacagtctgggacatccggtatagtaaccagagtttttgagcctgccgtattgggcttaaatttcaggtctgtagtcttgggcaagtcacctataaactcactgagattattttttcatctgtaaaatgggaagagttatgtttatttttgaagggtattaggataattaaaaataatgtaatgtgcctagcacactacctgaaaacgatggcatttgttcttattaatgtctttaaaatatgcaaggaccataagtttttcctcttgcagatgaggaaagtaaaaaataatacgaacatgtaattcagcttctcagattcaagccaatgttttttgcatcaacttttctatattgtatgtatgtatataaatacatagattaaggaaataggaaactgaaactctgtggaatataaactttttaaaaataatttcatcaggttttttgtatgttactgacccatatggattttagtaacatcttgcttagtcatgttgttataaaacattcaaattctgatatacattgcttgaaaatgagtgagtacctcagagaaatttgatagactcaaacagatagtatgagaaatatctttgaaagaaatatggaggaaggttaaaaggggattagtaaaattaatgcgataggtaacatgtttgtaaccatatagtatccttttagatacaaaagcttattttcattattattataataaacagttaatggttgaaacttagtaaaatgtcctatttctgattattaagactagtataaatgagaaaatccaagctattaagtaccattagctacagtgatcttagcttccttgcttacaattgttcagtgggtcatctaaattcttctatgtcctgagcatgatctacaaacatggtctagcttctgtctctccgtcttcccgccatcattgtgctgtagccatatggaactcctttcagttctctgaccatgccctttcctgcctcagatttcagcttaaattttgcctcctcagagagatgccttcccaaactccccatctgaagctggcctctgccttttactccctatcatgtcactctctgctcaccatccttatcacaatgtgtatttgatttgtttgctagtttactgtcttcacaacataatgtccgtttgtgcaagggtcttatttttcttattcatgtctgtatctcaagggtctagcacaatgcttgatgcatattgtgtgaataaatactttgttgccaaatccagtgaaaactctcagttcttgtttcactgcttggcagtattgacattgaatattctctgagatactttttttcttttggcttttcatatatcacactattattctcttatttctctggcctcttgctctcaacgtcctgtaagtgttggtgttccttaagttctacctagtgtcatcatttcttcattctgcatattctttccctagggtttcttcccaacaccaaaggacttaccatctgtctctctgaatctcagatctccagctttgatctgtttcctttactttagagctatatatttgcctgcctactggcctgtctctcacaatccatatattcaagaatgaacactatactttgcttcaaaccttcagaacattcaaaccgtttatgtttctcatctaatcaaatagagttactctctaagccagaagctgtaaactcatctcttttccctttattcaagctgtcaatttttgtctcctaaacatcttctagttatattctcatttctctgttcacattgcattaataatgatgataaacatttgcattcttattctgtgccaggcaacatgctaactgctgtatatatattattacatttgtactttggcaagaatcctgtgaagatttttatctttggactactagaagagaaagctgagttgtagagagagtatgtatttaagtccgtttgggctgctataacagaataccacagactgggtaacgtgatgaacaaaaatttatttggctcacagttctggaacctgggaaatccaaaggcatgatgctagcatttggtgagggcctttgtgctttgtcatcccatgccagaaggcagaagggtaagagagggcaagagtgagcaagagatggaagttgcaacctcaagctcttttataatgagcattaatccattcatgagggcttcaccctcatgacctaaacatctccattaggctccaccttccaatgcaacagttagcataagttttcaacacatgctttttgtagcattcaaaccatagcaggaagcaactttgcttaaaattgtatacctggtaagtggaaaaagagggatttgaatataggcaaatgacttcagaggatttactcttaatttctgttgtactgccttctaatcttggcctccatcatttcagattaccaaagctgtctcttaactggtttctttgtctccaaccttgtgcacttgctatctattctgtgtgctgcagcctgagtttttaaaaaacagaaaatgaggggccaggtgtggtggtggctcacgcctgtaatcccagcaagttgggaggctgaggcgggcagatcatctggggtcaggagttcgagaccagcctgaccaacgtggagaaacactatctctactaaaaatacaaaattagccaggcgtggtggtgcatgcctgtaatcctagctactcaggagcctgaggcaggagaattgcttgaacacgggaggcagaggttgcagtgagcagagattgcgccattgtactccagcctgggcaacaagagtgaaactccatctc

SEQ ID NO: 180 - DNA, 7596 bp, Homo Sapiens
agttccacttccggcgtatgaggcggtgacaatgggagcagcgcgggcggcgccgggaggcagctgacaagcgtttgcggcttcgcttcatggccgctctcccgcccctcctgggatctgtggggagctggggagcccgcagcggcccggagccggagctggcgagccgagcggagacctgtgcgccgcgcctctgaggcgcagcatgtgaagcggagacggcatccagtggggggcgagcctctcagccggccgggatggctaccacggccgagctcttcgaggagccttttgtggcagatgaatatattgaacgtcttgtatggagaaccccaggaggaggctctagaggtggacctgaagcttttgatcctaaaagattattagaagaatttgtaaatcatattcaggaactccagataatggatgaaaggattcagaggaaagtagagaaactagagcaacaatgtcagaaagaagccaaggaatttgccaagaaggtacaagagctgcagaaaagcaatcaggttgccttccaacatttccaagaactagatgagcacattagctatgtagcaactaaagtctgtcaccttggagaccagttagagggggtaaacacacccagacaacgggcagtggaggctcagaaattgatgaaatactttaatgagtttctagatggagaattgaaatctgatgtttttacaaattctgaaaagataaaggaagcagcagacatcattcagaagttgcacctaattgcccaagagttaccttttgatagattttcagaagttaaatccaaaattgcaagtaaataccatgatttagaatgccagctgattcaggagtttaccagtgctcaaagaagaggtgaaatctccagaatgagagaagtagcagcagttttacttcattttaagggttattcccattgtgttgatgtttatataaagcagtgccaggagggtgcttatttgagaaatgatatatttgaagacgctggaatactctgtcaaagagtgaacaaacaagttggagatatcttcagtaatccagaaacagtcctggctaaacttattcaaaatgtatttgaaatcaaactacagagttttgtgaaagagcagttagaagaatgtaggaagtccgatgcagagcaatatctcaaaaatctctatgatctgtatacaagaaccaccaatctttccagcaagctgatggagtttaatttaggtactgataaacagactttcttgtctaagcttatcaaatccattttcatttcctatttggagaactatattgaggtggagactggatatttgaaaagcagaagtgctatgatcctacagcgctattatgattcgaaaaaccatcaaaagagatccattggcacaggaggtattcaagatttgaaggaaagaattagacagcgtaccaacttaccacttgggccaagtatcgatactcatggggagacttttctatcccaagaagtggtggttaatcttttacaagaaaccaaacaagcctttgaaagatgtcataggctctctgatccttctgacttaccaaggaatgccttcagaatttttaccattcttgtggaatttttatgtattgagcatattgattatgctttggaaacaggacttgctggaattccctcttcagattctaggaatgcaaatctttattttttggacgttgtgcaacaggccaatactatttttcatctttttgacaaacagtttaatgatcaccttatgccactaataagctcttctcctaagttatctgaatgccttcagaagaaaaaagaaataattgaacaaatggagatgaaattggatactggcattgataggacattaaattgtatgattggacagatgaagcatattttggctgcagaacagaagaaaacagattttaagccagaagatgaaaacaatgttttgattcaatatactaatgcctgtgtaaaagtctgtgcttacgtaagaaaacaagtggagaagattaaaaattccatggatgggaagaatgtggatacagttttgatggaacttggagtacgttttcatcgacttatctatgagcatcttcaacaatattcctacagttgtatgggtggcatgttggccatttgtgatgtagccgaatataggaagtgtgccaaagacttcaagattccaatggtattacatctttttgatactctgcatgctctttgcaatcttctggtagttgccccagataatttaaagcaagtctgctcaggagaacaacttgctaatctggacaagaatatacttcactccttcgtacaacttcgtgctgattatagatctgcccgccttgctcgacacttcagctgagattgaatttacaaaggaattcagtgtcagttcctttacagaggaatgtcttatacttcagcagccctcggttgatagaaagcacaggagataccttatgacacagccaacattttgtgaaacaatgactggaacaaaacagcagccatacttacctttgaggttttatttaaagtttggataccactagctatattttgcttttttcccctcacattgaattttaattccattcttgaatgtagaaatttcagattctctaaaactacatgtcactgtttttatcctagaaaatgttgctgtcagaaggcaaaggaaatgttaccagtgttttcggttcttgtacttttaacatattccatttagaaattttgccattctgttttccattaataataggtgaaatacaggaaaactacatttgttattcctcagtttttaatgaccttttcagcatcaattgttaatcagattattttaggttttcgtaaataatttttttgcctctttcaaaaggttaacaattaagcatactttctgcagttggttgattggatttttttctgaggtacagcattaatactagtccaaaaaatgtcataaactgaactaaaatgatgaactattttatgtagacattaggagtggatcggaatacttctgctttctgggtaaaacttaaaagtttactatttcttatttggtaaatagattttaagccaattctagtaagaaattaataaaactaccttattttgtatttcacttaaggtggaggaccttaactaaaggaccatatttattcattattttaatattataagggaagtaaaaaaaagtgaggtatagtctaaatggtgcatataggaaatactgacagtgtttagcaacatgcagccctttgagatttctgtcgtaatgctaaacttgaataagatggaatggctgaacatgtggttagtcttttattttaagaagaattgagaattgatagatttggagatgagctttgcaaaggctgtttgcttttcatgtctataggtctgtcattgtcctttttcaaagcatttctgaagttattcctacttggatatagttaatggaattggcttaatttgatgacataataaatcacttataaaattttaaatatcaagtgaaaatttagaaaggccattactattctataaaccttataaacttgctctgggagaatgcattctaaattatatatagtgtttcagctcccattgtggtgttcatagtcttctaggaacagataaacttaagtattcaattcactcttggcattttttctttaatataggctttttagcctatttttggaaaactgcttttcttctgagaaccttattctgaatgtcatcaactttaccaaaccttctaagtccagagctaacttagtactgtttaagttactattgactgaattttcttcattttctgtttagtccagtgttaccaaggtaagctggggaatgaagtataccaacttctttcagagcattttaggacattatggcagctttagaaggctgtcttgtttctagccaagggagagccagcgcaggttttggatactagagaaagtcatttgcttgtactattgccattttagaaagctctgatgtgaattcaaattttacctctgttacttaaagccaacaattttaaggcagtagttttactggccatttaagctctttgtacagtgtcaatttgtaaaaaagaaaaaacgaaaaaaaatctcaaataaaacatgagataacattttaagacttccaaatcagagaagtgcttcaaattattttgtttggattaatttttaaaatgtaaagcatatacttgttgcttagttattttgtttattattttcatgtttgagttctgtgcaatattttctattatgtccgttgataggacagtgacaaaattcgtaagtgaatacttaatttaaaagtgttaacattaatgctcaataaacaaattccctgcagttgttttttttatttcactctttttatattttagagccatccatcctgaattttataaatgattttttatttaaaaatttgagatttttaaaatttttcacagcacaggtcttctcattttcttttttagcaaaaaatacttgactatataaacaagactagaaatttatcctaaacagatggtctttctctgagggaaaaaaaaaaatgtgtcatgtgaggcaatatgcattctttgtattctgattttttaagtgttttcatatttatagccatcacaaaattttgcccaaagtgtatggctcagaagagatgatcaataactaaaatgtttttcgttttgcacatggtaaaattttaggtagagagtggagctttgtataattggtaactttaaccaacatttacgtaagtacggtctttgcagtattacacaataccgcatgagctaatatgcagtatttaggtaatgcattgaatgaagttgaaaatatgctcttaacacactgtgcattgtttttctaaaattgagaaatatctgaaatacagaatacgaatttaataaaggaagcctaccttatgtaaattatgatgttgaaaatgacagtcaaccagagtagatgaagtgtccttatgaagaattattaaatagtagctggatggatctttagatggatgaccacctgaccattccaggacaatttttggtcccattttgaggattgccatagttgcaagtccttaggatcttccttgttttaaaaaactatcaaagtaggttaaattaaaatctaatttaaattaggttaatttatattacattgtagatcattcttttttcccccctctttcacttctaaatattttgctttctaaatactagccttctggttcacagtgaaataatttaattatcaatcagtagattgattccaagtggagaattcactgcttccctaaaatgcgtttttcttacctgtaatggtgaatatttacaaggatctggataaagagattttgatttttgaaatgccacaaaaccccttaaagtggtcaagtacctaaggtagtggctaaggcatgcttgaactgtgtttgagagacagcagttcagtcagtacataatttgttggtgactaacaaagctcacatctgggagattaactttttttaacgcaaaaatattctgcacattacccatatattgttgaattttacatacaaagcattttgtgctttcattcaattagtttaactatattcagtttctgtattatttctctctgatctatcctgtaattattctatactttagaagaaaagatcagttcatattgttagactgaataattctacatgaagttaaaagttagcaatttaaaaaattttgctgcataataaagataattatagttacatgtattgatttaagtctcacacactgtgctaataagtcctttgcacatattattggattctagagcaaccctaggatttgggtactattatttccatttgacagatgaaaaacctaatgcatagaaagataagtagaccagtcaaggtctacagctagtaaaatgctcagattgaaacctaaatcttttctcactcacttttaggttctatatgctattctccttacgtaacgttaaatagatcctttagtttgataggttcattagttttgcttaatcgttgcttccaatatgattcttattgtagtatttatattacaaagttggcatacagggtcaatatctaatttactgttgtgtttttcttaatatgttcaatgtatggtcatactttttaaatttgattttttaaatattataagtggtcatgaaattttaatgttaagtttgtacctaatagaaatatgtctatcacaaatctttattggtattattttatatacttttccagcttgataattttcacaatagaaagagaccaaatattttgtactatattttgtgacatagaagtaaatgacaactctaccttggaagatatgaagaaatcagtgtttttatgttcaaaaactattttaaatgtcataggcttgccaattgtgttaactatttagtacattggtagtttttaaatgactaatgctggagtgaaaatgtaaggcaaaatatttagtatattaacagtagatagtcattttcatgtaatcagaattgcatgttaagggttttaaaagctgtcataactcttaccttttatttctaccagtgatcaatcatttctctttacaaatttagggaggaaacaactgttcaaatgtataggggacagaaacctgacatttagagaacagaaattttaattgccaaattaaagcagctaggctgcccctgggcttaacaaaattcctatttttgaactagacccgaggtattttatcattattatttgataggtaccattaacctttgttttgtgattatcgacttttggggggaaagatgagtaattaaacacactcgcccattttctaagtggtttagaaggttgcagtctgcctcaccatacaaagccagtttaaataggaatatatcacatcatacttcacatagcagtcaacctcagaggaaagtcatttattcagaaggcatagattttgctagacagcagtgatgcattacaaatatataattatttgcactaatatttgagcaggtggaatggattagaacatggtcaacatcatgctgctgataacatgtatttttctatattaatatgtactgtgcaacatgtattaaaattgtcaataattcattttagccaagatactaatatttatattactgtgtttaagagacagtatccaactgagccacttttaatttaaaagtctgaaactggaattaagtttactttcaaaaatcacttaaattactttataatcagtgaaaggtcagtaaaatgtagaattataagtgcctagtgacttaataggaggaaatatggagggttaaggaaggaagtaggaacctggaataagaaagctaagtttcatttatagttccaatgagtgactttctttgttttcaccactgggaatcttaaatgaagaaagtgtcgtatcccttccagttatctttatgttaataaactaagtgaagtttggatagaactaacaaaggaattagtctccattggtggacttccagagtttt

SEQ ID NO: 181 - DNA, 1866 bp, Homo Sapiens
cgttcctcggcgccgccggggccccagagggcagcggcagcaacagcagcagcagcagcagcgggagtggagatggcggcggcggcggctcaggggggcgggggcggggagccccgtagaaccgagggggtcggcccgggggtcccgggggaggtggagatggtgaaggggcagccgttcgacgtgggcccgcgctacacgcagttgcagtacatcggcgagggcgcgtacggcatggtcagctcggcctatgaccacgtgcgcaagactcgcgtggccatcaagaagatcagccccttcgaacatcagacctactgccagcgcacgctccgggagatccagatcctgctgcgcttccgccatgagaatgtcatcggcatccgagacattctgcgggcgtccaccctggaagccatgagagatgtctacattgtgcaggacctgatggagactgacctgtacaagttgctgaaaagccagcagctgagcaatgaccatatctgctacttcctctaccagatcctgcggggcctcaagtacatccactccgccaacgtgctccaccgagatctaaagccctccaacctgctcagcaacaccacctgcgaccttaagatttgtgatttcggcctggcccggattgccgatcctgagcatgaccacaccggcttcctgacggagtatgtggctacgcgctggtaccgggccccagagatcatgctgaactccaagggctataccaagtccatcgacatctggtctgtgggctgcattctggctgagatgctctctaaccggcccatcttccctggcaagcactacctggatcagctcaaccacattctgggcatcctgggctccccatcccaggaggacctgaattgtatcatcaacatgaaggcccgaaactacctacagtctctgccctccaagaccaaggtggcttgggccaagcttttccccaagtcagactccaaagcccttgacctgctggaccggatgttaacctttaaccccaataaacggatcacagtggaggaagcgctggctcacccctacctggagcagtactatgacccgacggatgagccagtggccgaggagcccttcaccttcgccatggagctggatgacctacctaaggagcggctgaaggagctcatcttccaggagacagcacgcttccagcccggagtgctggaggccccctagcccagacagacatctctgcaccctggggcctggacctgcctcctgcctgcccctctcccgccagactgttagaaaatggacactgtgcccagcccggaccttggcagcccaggccggggtggagcatgggcctggccacctctctcctttgctgaggcctccagcttcaggcaggccaaggccttctcctccccacccgccctccccacggggcctcgggagctcaggtggccccagttcaatctcccgctgctgctgctgctgcgcccttaccttccccagcgtcccagtctctggcagttctggaatggaagggttctggctgccccaacctgctgaagggcagaggtggagggtggggggcgctgagtagggactcagggccatgcctgcccccctcatctcattcaaaccccaccctagtttccctgaaggaacattccttagtctcaagggctagcatccctgaggagccaggccgggccgaatcccctccctgtcaaagctgtcacttcgcgtgccctcgctgcttctgtgtgtggtgagcagaagtggagctggggggcgtggagagcccggcgcccctgccacctccctgacccgtctaatatataaatatagagatgtgtctatggctgaaaaaaaaaaaaaaaa

SEQ ID NO: 182 - DNA, 4269 bp, Homo Sapiens
gtttgcggtttagaccccaaagattcctgttggtggtctgggtcacaggaggcaggtttcgggagctggaaatgtgagcgggtacgacaggcaccgcgggtaaccgacgccccgggtccttgctgcagccgggtacgcgggataccggcaccccgccttctccgcccgagtgctgccaggcgtgggcctggaatctcttcacaccttctctttggagcccttaatgatacgacgaaccccaagtgtttcagaacatgaagtaaacaatggagaactgttctgctgcatcgacgttcctgactgacagcttagagctggagctggggacggaatggtgcaaacctccttacttttcttgtgctgttgacaacagaggaggaggaaaacatttttctggagaatcctacctctgcagcggagcccttaagcgattgattttgaatcttgaccctttaccaactaattttgaagaagataccttggaaatatttggcattcagtgggttactgaaacagcattagtgaattcatctagagaactctttcatttattcaggcaacaactgtacaacttggaaaccttgttacagtccagttgtgattttgggaaggtatcaactctacactgcaaagcagacaatattaggcagcagtgtgtactatttctccattatgttaaagttttcatcttcaggtatctgaaagtacagaatgctgagagtcatgttcctgtccatccttatgaggctttggaggctcagcttccctcagtgttgattgatgagcttcatggattactcttgtatattggacacctatctgaacttcccagtgttaatataggagcatttgtaaatcaaaaccagattaagctttttccaccgtcatggcatttattacatctccacttggatatacattggctggtgctagaaattctttacatgctgggtgaaaaattgaaacaagttgtatatggtcatcagtttatgaatctggcaagtgacaatttaaccaacatcagcctatttgaagaacattgtgaaactctcctttgtgatttaataagcctgtcactcaacaggtacgacaaggttaggtcttctgaatcattaatgagtgaccagtgtccatgtttacgcattaaagaattatgggttctacttattcatcttctagaccacagaagtaaatggtttgtctcggaatcattttggaactggttgaataaactacttaaaacactgcttgaaaaatcaagtgaccgaagaagatcctctatgcctgtaatccagtccagggatccattaggttttagttggtggattattactcatgtagcatcattttacaagtttgatcgccatggagtaccagatgaaatgagaaaagtggaatcaaattggaactttgtagaagaactgctgaaaaagtccatcagtgttcagggtgtcattctagaagaacaattacgaatgtatcttcactgttgtttgacactttgtgatttctgggagccaaacattgcaattgttaccattttatgggaatattatagtaagaacctgaatagttccttcagtatttcttggcttccttttaaaggccttgctaataccatgaagtcacccttgtctatgcttgaaatggtgaagacttgctgttgcgataaacaagatcaggaactatataaatccagcagtagttatactatttttctttgtattctggcaaaagttgttaaaaaagcaatgaagagcaatggccctcatccttggaaacaagtcaaaggaagaatatattcaaaattccatcaaaaaagaatggaagaactaactgaagttggtctacagaacttttttagcctttttctactgttagcagctgttgcagaggtagaagatgttgcaagtcatgttttagacctcctgaatttcctcaagcctgctttcgtaatgtctcagagagccctcatttggaagggtcacatggccttcctcttgatgtatgcccagaaaaatctggacattggtgttttggctgagaaattttcatgtgctttccgggagaaagcaaaggaattcttggtgtctaagaatgaggaaatggtacagagacagactatctggacccttctttccatatacattgatggtgttcaagaagtgtttgagaccagctattgcttgtatccttcccatgaaaaactgcttaatgatggatttagtatgcttctgcgagcatgtcgagaatctgaacttaggacagtattgagcttcctacaagctgttctggccagaatcaggagtatgcatcaacaattgtgtcaggaacttcaaagggacaatgtggacctatttgtacagtcttcattatcggctaaagagcgccaccttgctgcagttgccagtgcactgtggagacatttcttttcatttttgaagagtcagagaatgtcacaggtagtgcctttctcacaacttgcggatgcagctgcagactttactttgctagcaatggacatgccaagcacagctccatcagattttcagcctcagccagttatatcaattattcaactttttggttgggatgatatcatctgccctcaagttgtagcaagatatttaagtcatgtcctacaaaatagcacattatgtgaagcactttctcattcaggctatgtatcttttcaagccttaaccgtaagatcatggattcgttgtgttttgcaaatgtatattaaaaacctctctgggcctgatgatttgctcatagataaaaatctggaagaggcagttgaaaaagagtacatgaaacagttggtcaaactgacaagattactatttaatctctcagaagtaaagagtattttctcaaaggcccaagctgaatatttatccatctcagaagaccctaaaaaagcacttgttcgattctttgaggctgttggtgtaacttacgggaacgtccagacactttctgataaatctgccatggtcacaaagtccttggaataccttggtgaagtattaaaatatattaagccttatttgggaaaaaaagttttcagtgcagggctgcagctgacttatggaatgatgggaattcttgtgaaatcatgggcacaaatctttgccacttctaaagcccaaaaattactattccggatcatagattgtttactgctgccacatgcagtattacagcaagagaaggaactgcctgcacctatgttgtcagcaattcagaaaagtcttcctttgtatctccagggcatgtgtatcgtgtgttgtcaatctcaaaatccgaatgcctatttgaatcaattgctagggaatgttattgagcagtatattgggcgatttcttccagcttcaccatatgtttcagatcttggacaacatcctgttttgctggcattgagaaacacagccactattccgccaatatcatctctaaagaaatgcattgtgcaagtcataaggaaatcctaccttgagtataaggggtcctcacctcctcctcgcttagcatccattctggccttcatcctccaactcttcaaggaaactaacacagacatttatgaagttgaactactcctccctggcattttaaaatgcttggtgttagtcagtgaaccacaagttaaaaggctggccacagagaacctgcaatacatggtaaaagcctgccaagtggggtcagaagaagaaccttcctcccagctgacttctgtgtttaggcagtttatccaggattatggtatgaggtactattaccaggtttacagcattttagaaacagtagcaacattggaccagcaggttgtcatccacttgatttctacccttactcagtctctgaaggattcagagcagaaatggggccttggcaggaatatagcacaaagggaagcctatagcaaacttttgtctcaccttggacagatgggacaagatgagatgcagagactggaaaatgataatacttaatatattttgtgattcatcctgtctattaattatcagtatctaaagccacattgttccactctaattcctacttttaattaattgtataatgttctgtttaaaataatttctaggattttttttccttttatatctgtaagtaaaaaatgtataaataaggaactgaaggttaattagcaactgtgtaataggatccttggaactttttacaaaactgcattctaccttgatgaaattttagttaaactaaattaaagaaacattttctgag

SEQ ID NO: 183 - DNA, 2765 bp, Homo Sapiens
ggcggcagcgcccggcgcccgggctcacctcggccatgagcagcgcagccggcccagacccgtcggaggcgcccgaagagcggcatttcctcagcaccgcggaggcagccgccctggagcgggagctgctggaggattatcgctttgggcggcagcagctcgtggagctgtgcggtcatgctagtgccgtggctgtgaccaaggtggggaaactgaagctcagaggtggcgaggggcctgccctgggtcagagggggatggaagcagagctgcaacccaggtgtgtctggctctggagtaaacccccacacctcgaggggccaggaggatgacacaagggtgatagcaataatcatactatggagtgcttcaccgtgcagccagcagtgctgggcatcagtttcctctgcaacagcataataaatggtactgacgagtcagtccctaaacgtgaacgcctcagaaaactgtcccatacagtcgaggctctagcgtgactgcctcctcttcctcccctgccctcctcatccccctcgcctttctcctccttcctcctcctcctgccccctcctcttaccctcctcctcctttctctctccctcctcctccccttccgcccctttcttctctcctttctccttcctctccctcctcctccccctcctcctgttctccttcctccttcccacttaccctacctcctccccatcctcctcctccccattctctccctcctcacccctcctcctctttttcttcttattaccacggtatactttttaaaaactcaatgtttttcttcatgtggacttaaatgtttgtatttccaaatgaaatagatcccgggtgaggcgcccaaaggagaaggaaaatcaaaaccccagaaagaaacccagtagtcactactcgcctggcgctcagtggccaactgtctggtttttgcactgaaagccccttgtctgtccagaagcccctcagtcccagtcttgggtcttgggctctgggcccggtgtggctgggatcgcaggcatgttcatggcaggtcaggactgcgctaagcctttggggaggatacttgaaaggggagtaatctgctgtctgtgtggttggagcttaaagtacagctggggctcaagagacacccagagtgcctgtcaggcggtggcactgtcatcgcatttgataaaggccaaactgagtctgggagagaaggggctggggccacgcagaatcagggcagggctggggccaaaatgcctggagagacagagtctgagagatacagagatggccagagacagatggagagagacagataacagagagatacagagacagccagagacaaatggagagagagacaaatggagaaagagagccagagacatacagaaagacagagacactagagtctgagagatacagacagacacagagacagccagagacagatggagagagacagagacacaaagagagccagagacacagagagtctgagagatacagacagacacagagacggccagagacggagagagacagagacagacagagacgcagagagtctgagagatacagaaacagccagagacaggtggggagagagacatgaagagagccagagacatacagagagacagagacacacagagagacagagacacggagagtctgagagatacagagagacacagagacagccagagagagacagagaggccccagggcatcgtggctaaggttgggctcccctactccacagcctccaggaggggctgaggtctggaaacatgggcgggggtgggcccgcggtgagaaaggtggaagaatgtctgcaactcaggcggagaataaacaaaccgcactccgggcgacgggcagtggctggatgcacgtttttcctgcaccgacctggcagagcctgagaccgggcctctgcatctccagcggggaaactgaggccccaagaggcccaacccctcatccagaacagctcacctcctgtcctatcctgttgcctccaggcccaagccccatcccttcccctactccgggcctcagtttcctctccaggcaaggaggaatctggactgtgcctgtgcctttgctgtgtcccctaccaccaggcgttcccgttgcccgctctctcccggaagcagaggacggtgctggtcgtgtgtggcccggagcagaacggggcagtggggctggtctgtgcccggcacctgcgggtgtttgagtatgaacccaccatcttctaccccacacgctcgctggacctgctgcatcgggacctgaccacccagtgcgagaagatggacatccccttcctgagctacctgcccactgaggtgcagctcattaacgaagcctatgggctggtggtggatgccgtactgggccccggcgtggagccgggcgaggtcgggggcccctgcacccgcgcgctggccacgctcaagctgctgtccatccccctcgtgagcctggacatcccctcaggctgggacgcagagaccggcagcgattcggaggacgggctgcggcctgacgtgctggtgtctctcgcggcgcccaagcgctgcgctggccgcttctccgggcgccaccacttcgtggccggcaggttcgtgcccgatgacgtgcgccgcaagttcgctctgcgcctgccgggatacacgggcaccgactgcgtcgcggcactgtgaccgccacccgcggccacaccgcagggaccctcgccaataaacagccctcccacc

SEQ ID NO: 184 - DNA, 1494 bp, Homo Sapiens
agtgaaacagaaggggaggtgcagtttcagaacccagccagcctctctcttgctgcctagcctcctgccggcctcatcttcgcccagccaaccccgcctggagccctatggccaactgcgagttcagcccggtgtccggggacaaaccctgctgccggctctctaggagagcccaactctgtcttggcgtcagtatcctggtcctgatcctcgtcgtggtgctcgcggtggtcgtcccgaggtggcgccagcagtggagcggtccgggcaccaccaagcgctttcccgagaccgtcctggcgcgatgcgtcaagtacactgaaattcatcctgagatgagacatgtagactgccaaagtgtatgggatgctttcaagggtgcatttatttcaaaacatccttgcaacattactgaagaagactatcagccactaatgaagttgggaactcagaccgtaccttgcaacaagattcttctttggagcagaataaaagatctggcccatcagttcacacaggtccagcgggacatgttcaccctggaggacacgctgctaggctaccttgctgatgacctcacatggtgtggtgaattcaacacttccaaaataaactatcaatcttgcccagactggagaaaggactgcagcaacaaccctgtttcagtattctggaaaacggtttcccgcaggtttgcagaagctgcctgtgatgtggtccatgtgatgctcaatggatcccgcagtaaaatctttgacaaaaacagcacttttgggagtgtggaagtccataatttgcaaccagagaaggttcagacactagaggcctgggtgatacatggtggaagagaagattccagagacttatgccaggatcccaccataaaagagctggaatcgattataagcaaaaggaatattcaattttcctgcaagaatatctacagacctgacaagtttcttcagtgtgtgaaaaatcctgaggattcatcttgcacatctgagatctgagccagtcgctgtggttgttttagctccttgactccttgtggtttatgtcatcatacatgactcagcatacctgctggtgcagagctgaagattttggagggtcctccacaataaggtcaatgccagagacggaagcctttttccccaaagtcttaaaataacttatatcatcagcatacctttattgtgatctatcaatagtcaagaaaaattattgtataagattagaatgaaaattgtatgttaagttacttcactttaattctcatgtgatccttttatgttatttatatattggtaacatcctttctattgaaaaatcaccacaccaaacctctcttattagaacaggcaagtgaagaaaagtgaatgctcaagtttttcagaaagcattacatttccaaatgaatgaccttgttgcatgatgtatttttgtacccttcctacagatagtcaaaccataaacttcatggtcatgggtaaa

SEQ ID NO: 185 - DNA, 2058 bp, Homo Sapiens
gttgggaaagagcagcctgggcggcaggggcggtggctggagctcggtaaagctcgtgggaccccattgggggaatttgatccaaggaagcggtgattgccgggggaggagaagctcccagatccttgtgtccacttgcagcgggggaggcggagacggcggagcgggccttttggcgtccactgcgcggctgcaccctgccccatcctgccgggatcatggtctgcggcagcccgggagggatgctgctgctgcgggccgggctgcttgccctggctgctctctgcctgctccgggtgcccggggctcgggctgcagcctgtgagcccgtccgcatccccctgtgcaagtccctgccctggaacatgactaagatgcccaaccacctgcaccacagcactcaggccaacgccatcctggccatcgagcagttcgaaggtctgctgggcacccactgcagccccgatctgctcttcttcctctgtgccatgtacgcgcccatctgcaccattgacttccagcacgagcccatcaagccctgtaagtctgtgtgcgagcgggcccggcagggctgtgagcccatactcatcaagtaccgccactcgtggccggagaacctggcctgcgaggagctgccagtgtacgacaggggcgtgtgcatctctcccgaggccatcgttactgcggacggagctgattttcctatggattctagtaacggaaactgtagaggggcaagcagtgaacgctgtaaatgtaagcctattagagctacacagaagacctatttccggaacaattacaactatgtcattcgggctaaagttaaagagataaagactaagtgccatgatgtgactgcagtagtggaggtgaaggagattctaaagtcctctctggtaaacattccacgggacactgtcaacctctataccagctctggctgcctctgccctccacttaatgttaatgaggaatatatcatcatgggctatgaagatgaggaacgttccagattactcttggtggaaggctctatagctgagaagtggaaggatcgactcggtaaaaaagttaagcgctgggatatgaagcttcgtcatcttggactcagtaaaagtgattctagcaatagtgattccactcagagtcagaagtctggcaggaactcgaacccccggcaagcacgcaactaaatcccgaaatacaaaaagtaacacagtggacttcctattaagacttacttgcattgctggactagcaaaggaaaattgcactattgcacatcatattctattgtttactataaaaatcatgtgataactgattattacttctgtttctcttttggtttctgcttctctcttctctcaacccctttgtaatggtttgggggcagactcttaagtatattgtgagttttctatttcactaatcatgagaaaaactgttcttttgcaataataataaattaaacatgctgttaccagagcctctttgctggagtctccagatgttaatttactttctgcaccccaattgggaatgcaatattggatgaaaagagaggtttctggtattcacagaaagctagatatgccttaaaacatactctgccgatctaattacagccttatttttgtatgccttttgggcattctcctcatgcttagaaagttccaaatgtttataaaggtaaaatggcagtttgaagtcaaatgtcacataggcaaagcaatcaagcaccaggaagtgtttatgaggaaacaacacccaagatgaattatttttgagactgtcaggaagtaaaataaataggagcttaagaaagaacattttgcctgattgagaagcacaactgaaaccagtagccgctggggtgttaatggtagcattcttcttttggcaatacatttgatttgttcatgaatatattaatcagcattagagaaatgaattataactagacatctgctgttatcaccatagttttgtttaatttgcttccttttaaataaacccattggtgaaagtcccaaaaaaaaaaaaaaaaaaaaa

SEQ ID NO: 186 - DNA, 2664 bp, Homo Sapiens
gggtctcaaagtttccgtctgctctgtgcagagggagtggagctccgagggcttgtggcttcgcagttcctcttctgtgaacagccgagatcacgcgctcctccccagccacccgttcctccccgcagtccttcccctccactcccttccccttctctgctcatgcagggagcccaggaagcctccgcctcagagatgctaccgctgctgctgcccctgctgtgggcaggggccctggctcaggagcggagattccagctggaggggccagagtcactgacggtgcaggagggtctgtgcgtcctcgtaccctgcagattgcccactacccttccagcctcgtactatggttatggctactggttcctggaaggggctgatgttccagtggccacaaacgacccagacgaagaagtgcaggaggagacccggggccgattccacctcctctgggatcccagaaggaagaactgctccctgagcatcagagatgcccggaggagggacaatgctgcatacttctttcggttgaagtccaaatggatgaaatacggttatacatcttccaagctctctgtgcgtgtgatggccctgacccacaggcccaacatctccatcccagggaccctggagtctggccatcccagcaatctgacctgctctgtgccctgggtctgtgagcaggggacgccccccatcttctcctggatgtcagctgcccccacctccctgggccccaggaccacccagtcctcggtgctcacaatcaccccacggccccaggaccacagcaccaacctcacctgtcaggtgacgttccctggagccggtgtgaccatggagagaaccatccagctcaatgtctcctccttcaaaatcctgcaaaacacctcgtccctccctgtcctggagggccaggctctgcggctgctctgtgatgctgacggcaacccccctgcacacctgagctggttccagggcttccccgccctgaacgccacccccatctccaataccggggtcctggagctgcctcaagtagggtctgcagaagaaggagatttcacctgccgtgctcagcatcctctgggctccctgcaaatctctctgagtctctttgtgcattggaaaccagaaggcagggctggtggtgtcctgggagcagtctggggagctagcatcacaaccctggttttcctctgtgtttgcttcatcttcagagtgaagactagaaggaagaaagcagcccagccagtgcaaaacacggatgatgtgaaccccgtcatggtctcaggctccaggggtcatcagcaccagttccagacaggcatagtttcagaccaccctgctgaggctggccccatctcagaagatgagcaggagctccactacgctgtcctacacttccacaaggtgcaacctcaggaaccaaaggtcaccgacactgagtactcagaaatcaagatacacaagtgaggaattgtccaaagccataaccttgattggagagaacatggtacctctcagtgtattggttactagggctgccacagcaatgtaccacaaaccgagtgacataaacacagaactttattttcgtatagtttcagatgttagaggtctgagaacaaggtgttatcagggttggtcccttctaaggcctctcttgttggcttgtagatggctgtctcctccttgtgtcttcacatggtctttcctctgagtgtgtttgtgtcctaatcttctcttcttataaagacactagtcatattggattagggcctccccatgacctaatttaaataaattaactatttaaagaccctccaaatacagtaaccttctgagatattgagatttaggacttccaacatatgaattttagaagggaacaatttagcccataacactgtgtccaattcttttaaaattaatgtttttgttgtaaatggactatataaataccttcgtatatatggcagaccacaggacttctgtccaagagaactgagttcaactccatctatgccagcctgggcaacagagcgagactccaactcagaaaaagcaaaacaaaacaaacaaacaagcaaaaaaccacaattagactgacagctgacttttttaggagcaatattggaaggctaaatgcaatagaaagatgtctttgatggcttaagagaaataaatgttgttttagaaagcctactcaatgaaaacacattttaagactgaaagtgaaatatagatattttaaggaaaaccaaaatatgtgagtgttaataaagaaaagatttctcaaataaattctaaaacatataattcaggtattaggaaagtgatcccagattagatttttgagatccaaaaaaaatgaaaacctaggaaagtagcaaatatgtgagcaaaatgaaacaaatacttgttgtaaaaatgatggtttgtagaggggtcaaacatcaaatgtaatattgaaataccaatattatatagcccagaaactataataacataaagttcagaagagtgtaaatagaatttatattacataaagtctttatatttttccagagaaaattaaatgttatgatgaatgttaaaaaaaaaaaaaaaaaaaaaaaaaaaaaaaaaaaaaaaaaaaaaaaaaaaaaaaaaaaaaaaaaa

SEQ ID NO: 187 - DNA, 3407 bp, Homo Sapiens
caagccagagcaatcgaacggttctgagtcatctgccggaagccttgccctcaatcaaggcggacgtgaagcatctacaaaggaggaatagtcaaagcagcagcggcggcggcggcggcggcagcagcagcagcagcaggaggtgggggcctctgccagaccttctctgatggatgacctctgtgaagcaaatggcacttttgccatcagcttatttaaaatattgggggaagaggacaactcaagaaacgtattcttctctcccatgagcatctcctctgccctggccatggtcttcatgggggcaaagggaagcactgcagcccagatgtcccaggcactttgtttatacaaagacggagatattcaccgaggtttccagtcacttctcagtgaagttaacagaactggcactcagtacttgcttagaactgccaacagactctttggagaaaagacgtgtgatttccttccagactttaaagaatactgtcagaagttctatcaggcagagctggaggagttgtcctttgctgaagacactgaagagtgcaggaagcatataaatgactgggtggcagagaagactgaaggtaagatttcagaggtactggatgctgggacagtcgatcccctgacaaagctggtccttgtgaatgccatttatttcaagggaaagtggaatgagcaatttgacagaaagtacacaaggggaatgctctttaaaaccaacgaggaaaaaaagacagtgcagatgatgtttaaggaagctaagtttaaaatggggtatgcggatgaggtacacacccaggtcctggagctgccctatgtggaagaggagctgagcatggtcattctgcttcccgatgacaacacggacctcgccgtggtggaaaaagcacttacatatgagaaattcaaagcctggacaaattcagaaaagttgacaaaaagtaaggttcaagttttccttcccagattaaagctggaggagagttatgacttggagcctttccttcgaagattaggaatgatcgatgcttttgacgaagccaaggcagacttttctggaatgtcaactgagaagaatgtgcctctgtccaaggttgcccacaagtgcttcgtggaggtcaatgaggaaggcacagaggctgccgcagccactgctgtggtcaggaattcccggtgcagcagaatggagccaagattctgtgcagaccacccttttcttttcttcatcaggcaccacaaaaccaactgcatcttgttctgtggcaggttctcttctccgtaaagaggagcaattgctgtacataccctcctttccttctacctatcttgccttaattaacattccctgtgacctagttggtgcagtggcttgaatgccaaaataaagcgtgtgcactggatagtgtgtgaaagtctttgctgaaagttccagagccattgagaataactgaggccgcagatgcatgaaatttgggcctgggaaggctatgctggttttggagtgtttggggtgcctgccattgcctctgccttcacctaagtctgtgcccattgtttcaggggatcttatggagcatctcagggcttcaggagccagccctcttccatccgcccggctctgcccaccaccactgccaggctgaacaggggactagtgcccaggtgacactgcacacaaagccaagggcaaaccctatagagtaaagctgcagccaccctgtgtctcatgtgcagctgaaatagtgatctgcttctgtcactgtcacatagacagccctgcatgccccctgtctcacacagtttgtaatgaagacagctccttctcatctttccataagcctgagatacaagttcagggactcagcaatgcactttaggactgagctaggaggcaaatatctgaagcttgctatgctgttctttccattccttttccctctgaaacacacaaaataccaaaggaacttacgcaacacaccactgagtcctctaactaatcatatgtgctcagacacagctcaagcacaccccttagttaagaaagaacctccatatacattaatttttttctgcctaaaaataaaattgcgttgtggcagcaatttggaaactacagcaaagtctccaaaaaaattgaagtcacccacaattccaacacacagcaatcactgctgttaatagtgatatacatccttccctattatgtgtatgcaaatagaaatttataagcattttactacaagttaatcatatccttcagtagcttatttcttcccttatgaaaaacctcccttaagatctttccaggtcatcaatttgatgtgcatagtattccactgtgtggctggatttctataattgaatctaattttagacagtttgagtaattaaaattatttctattaacaaataatagattgctaataatatatattatgctgttttggatatactaaatatttgctcacatccttaatatattttttaaaattcctaacaatagtactgttgagataaaagttgagcacattttgagacttcttccaaattggtccctagaaagttacactggtttgtactctcacttatgtcactgtttataccaccactgactgctgcctgctttattatttctttaatgagttggactgaacagtggttaatcctgactctgtttttgactgacagttaacagttacatgaaccattcatattacagctcttacttaaatttgaccaagccaggatatatctgttaggccacattcatttagggatcatgttttccaaagcaggtttgggcaaaattaatccacaggactgaaaggtatacatctgtgagttttgttctcacttccacctctaatttgaagaacactttaattgacacagaatacatttcacatatttaacctctacaataagttctgacacattttccatgaaacaaaccatcgctatattcaagataatgaacctatctatcatactcccaaattccttcttgcatctttgtaatttctcactcttccttctccctctccccgtcccatcccaaccactgatctgctcaggcaactaccaatcttctttctgtcactatagattaatttgcatttttaaagaaatttacatacatggaaccatacatcatctatgctttgtagtatgactcctgtcactcagtacaattattttgagattcatttatgttattgtatgtatcaatagttcatcccttttattggtaagtaacatttttttgtataggtataccatgatttgttgatgaacaaatttacctgttgatgaacatttacgttgttaccaagatttttgctattgaaaataaagtttttatgaatatttatatatataaaaaaaaaaaaaaaaaa

SEQ ID NO: 188 - DNA, 3623 bp, Homo Sapiens
ctagccccacctgctccgtttcccgcccagctggagctctggagcctttgcttcctcaaatacgagcgggaactgcgttgagcgctggattccaggccgagtgctggcgaggcgcgcagttctctgctgtttaaaaagtatccctgtgtgtttcagctgaaccatccgttcatcttcaagccatcatgagctgtaagaagcagaggtcacggaagcactcagtcaatgaaaaatgtaatatgaaaatcgagcactatttttctccggtctctaaagagcaacagaataattgcagtacttctctaatgaggatggagtctagaggagacccaagagccacaactaatacccaggctcaaagattccattcacctaagaaaaatccagaagaccagaccatgccccaaaataggacaatatatgttaccttgaaggtaaaccacaggagaaaccaagatatgaaacttaagctcacacatagtgagaatagtagcttatatatggctctcaacactctccaggctgtcagaaaagagatagaaactcaccaaggccaagaaatgcttgtgcgtggcacagaaggaatcaaagagtacataaaccttggaatgcccctcagttgtttccctgaaggtggccaggtggtcattacattttcccaaagtaaaagtaagcagaaggaagataaccacatatttggcaggcaggacaaagcatcgactgaatgtgtcaaattttacattcatgcaattggaattgggaagtgtaaaagaaggattgttaaatgtgggaagcttcacaaaaaggggcgcaaactctgtgtttatgctttcaaaggagaaaccatcaaggatgcactgtgcaaggatggcagatttctttcctttctggagaatgatgattggaaactcattgaaaacaatgacaccattttagaaagcacccagccagttgatgaattagaaggcagatactttcaggttgaggttgagaaaagaatggtccccagtgcagcagcttctcagaatcctgagtcagagaaaagaaacacctgtgtgttgagagaacaaatcgtggctcagtaccccagtttgaaaagagaaagtgaaaaaatcattgaaaacttcaagaaaaaaatgaaagtaaaaaatggggaaacattatttgaattgcatagaacaacgtttgggaaagtaacaaaaaattcttcttcgattaaagtagtgaaacttcttgtacgtctcagtgactcagttgggtacttattctgggacagtgcaactacgggttacgccacctgctttgtttttaaaggattgttcattttaacttgtcggcatgtaatagatagcattgtgggagacggaatagagccaagtaagtgggcaaccataattggtcaatgtgtaagggtgacatttggttatgaagagctaaaagacaaggaaacaaactacttttttgttgaaccttggtttgagatacataatgaagagcttgactatgctgtcctgaaactgaaggaaaatggacaacaagtacctatggaactatataatggaattactcctgtgccacttagtgggttgatacatattattggccatccatatggagaaaaaaagcagattgatgcttgtgctgtgatccctcagggtcagcgagcaaagaaatgtcaggaacgtgttcagtctaaaaaagcagaaagtccagagtatgtccatatgtatactcaaagaagtttccagaaaatagttcacaaccctgatgtgattacctatgacactgaatttttctttggggcttccggctcccctgtgtttgattcaaaaggttcattggtggccatgcatgctgctggctttgcttatacttaccaaaatgagactcgtagtatcattgagtttggctctaccatggaatccatcctccttgatattaagcaaagacataaaccatggtatgaagaagtatttgtaaatcagcaggatgtagaaatgatgagtgatgaggacttgtgagaattcagtctactggatttaagggaatggcttatggagttgttatttcataggcattgaaaatggttttctaaactccaaaatggtcatcttatcaataataataatattgaccatttcctatctgccaggcatttttctaagcacatgaagaaattagtcctaacaacactatgagatggactataacttgcccaaattttttttttttttttgagactgagtctcactctgtcgcctgggctggagtacagtggtgcgatctcagctcactgcaacttccacctcccaggttcaagcgattcttatgcctcagtctcctgagcagctgggattacaggcaaacgccaccacacccagctaaatttttttttttttttgtatttttagtagagacagggtttcaccatgttggtcaggcgggtctcgaactcctgacctcgtgatccacctgcctcggccttccaaagtgctgggattacaagtttgagccactgcacctggctaacttgccctattttaaagtcaagcaatgggaagaataacaagattatatagtaatcagtttcatgacactaaaagtcatatagtcatagggttttttcatctttcatatctttgcctaaattcatttgctacagtgcaggaaccaaaacttgttcatctcatgattccctacatctgacataaggaaagtaagtgctcagaaaaatgtgcaggtcaataagttgcaaaagttggggctgcaattaatgctaacataagagctaaatgcttgattagaaatgatctcaaaaccttttagaatttccaaaatcttcatattactgaaactgtcggaatatatgggtcttgaaattcagaagatgatagtcactcttcccatatttataggctattaaggcaagggatatcttaaacatcatattactttatttagatttctactactccaattattaatgttatgtatttctcattgttttacttcttcatggtattatgaagactatatagatgattcaaccaagcctgcaaatctccctcttgtggaattccactggacccaatctgttttccatttccattgcaatactactaaagccatacaatatcaagcaccctccctctaggtccagggactatcacagaagaagcaggcatgtaagattttaaggactggtttcgaggggtcgagtgtaggaaaacagcctgttgcattgtaagagtgatgtcatcttgaagagcagctggcatgatgactgctgtttgactcctgcataccaagatattctgcagcaatgtctttaaacagtgccggtagtacagataacccctcataaagatgcttatctaacctccccagtgttcaggtgtttcacaagaaagtctgagatatgactagctacacgttttgccaaaaatgcttgttatataaagggtacttttgggagggtgagtgccgccatttagtggctgctagaaacattgcttctgtttgtaagttcctattaaatgtttctttctgagaaaaaaaaaaaaaaaaaaaaaaaaaaaaaaaaaaaaaaaaaaaaaaaaaaaaaaaaaaaaaaaaaaaaaaaa

SEQ ID NO: 189 - DNA, 6335 bp, Homo Sapiens
gcccaacatggctggagcgcggcggaggtgagccggccgcccgcccgcagacgccccagcctactgcgcccgagtcccgcggccccagtggcgcctcagctctgcggtgccgaggcccaacggctcgatcgctgcccgccgccagcatgttgggcgccccggacgagagctccgtgcgggtggctgtcagaataagaccacagcttgccaaagagaagattgaaggatgccatatttgtacatctgtcacaccaggagagcctcaggtcttcctagggaaagataaggcttttacttttgactatgtatttgacattgactcccagcaagagcagatctacattcaatgtatagaaaaactaattgaaggttgctttgaaggatacaatgctacagtttttgcttatggacaaactggagctggtaaaacatacacaatgggaacaggatttgatgttaacattgttgaggaagaactgggtattatttctcgagctgttaaacacctttttaagagtattgaagaaaaaaaacacatagcaattaaaaatgggcttcctgctccagattttaaagtgaatgcccaattcttagagctctataatgaagaggtccttgacttatttgataccactcgtgatattgatgcaaaaagtaaaaaatcaaatataagaattcatgaagattcaactggaggaatttatactgtgggcgttacaacacgtactgtgaatacagaatcagagatgatgcagtgtttgaagttgggtgctttatcccggacaactgccagtacccagatgaatgttcagagctctcgttcacatgccatttttaccattcatgtgtgtcaaaccagagtgtgtccccaaatagatgctgacaatgcaactgataataaaattatttctgaatcagcacagatgaatgaatttgaaaccctgactgcaaagttccattttgttgatctcgcaggatctgaaagactgaagcgtactggagctacaggcgagagggcaaaagaaggcatttctatcaactgtggacttttggcacttggcaatgtaataagtgccttgggagacaagagcaagagggccacacatgtcccctatagagattccaagctaacaagactactacaggattccctcgggggtaatagccaaacaatcatgatagcatgtgtcagcccttcagacagagactttatggaaacgttaaacaccctgaaatacgccaatcgagctagaaatatcaagaataaggtgatggtcaatcaggacagagctagtcagcaaatcaatgcacttcgtagtgaaatcacacgacttcagatggagctcatggagtacaaaacaggtaaaagaataattgacgaagagggtgtggaaagcatcaatgacatgtttcatgagaatgctatgctacagactgaaaataataacctgcgtgtaagaattaaagccatgcaagagacggttgatgcattgaggtccagaattacacagcttgttagtgatcaggccaaccatgttcttgccagagcaggtgaaggaaatgaggagattagtaatatgattcatagttatataaaagaaatcgaagatctcagggcaaaattattagaaagtgaagcagtgaatgagaaccttcgaaaaaacttgacaagagccacagcaagagcgccatatttcagcggatcatcaactttttctcctaccatactatcctcagacaaagaaaccattgaaattatagacctagcaaaaaaagatttagagaagttgaaaagaaaagaaaagaggaagaaaaaaagtgtggctggtaaagaggataatacagacactgaccaagagaagaaagaagaaaagggtgtttcggaaagagaaaacaatgaattagaagtggaagaaagtcaagaagtgagtgatcatgaggatgaagaagaggaggaggaggaggaggaagatgacattgatgggggtgaaagttctgatgaatcagattctgaatcagatgaaaaagccaattatcaagcagacttggcaaacattacttgtgaaattgcaattaagcaaaagctgattgatgaactagaaaacagccagaaaagactgcagactctgaaaaagcagtatgaagagaagctaatgatgctgcaacataaaattcgggatactcagcttgaaagagaccaggtgcttcaaaacttaggctcggtagaatcttactcagaagaaaaagcaaaaaaagttaggtctgaatatgaaaagaaactccaagccatgaacaaagaactgcagagacttcaagcagctcaaaaagaacatgcaaggttgcttaaaaatcagtctcagtatgaaaagcaattgaagaaattgcagcaggatgtgatggaaatgaaaaaaacaaaggttcgcctaatgaaacaaatgaaagaagaacaagagaaagccagactgactgagtctagaagaaacagagagattgctcagttgaaaaaggatcaacgtaaaagagatcatcaacttagacttctggaagcccaaaaaagaaaccaagaagtggttctacgtcgcaaaactgaagaggttacggctcttcgtcggcaagtaagacccatgtcagataaagtggctgggaaagttactcggaagctgagttcatctgatgcacctgctcaggacacaggttccagtgcagctgctgtcgaaacagatgcatcaaggacaggagcccagcagaaaatgagaattcctgtggcgagagtccaggccttaccaacgccggcaacaaatggaaacaggaaaaaatatcagaggaaaggattgactggccgagtgtttatttccaagacagctcgcatgaagtggcagctccttgagcgcagggtcacagacatcatcatgcagaagatgaccatttccaacatggaggcagatatgaatagactcctcaagcaacgggaggaactcacaaaaagacgagagaaactttcaaaaagaagggagaagatagtcaaggagaatggagagggagataaaaatgtggctaatatcaatgaagagatggagtcactgactgctaatatcgattacatcaatgacagtatttctgattgtcaggccaacataatgcagatggaagaagcaaaggaagaaggtgagacattggatgttactgcagtcattaatgcctgcacccttacagaagcccgatacctgctagatcacttcctgtcaatgggcatcaataagggtcttcaggctgcccagaaagaggctcaaattaaagtactggaaggtcgactcaaacaaacagaaataaccagtgctacccaaaaccagctcttattccatatgttgaaagagaaggcagaattaaatcctgagctagatgctttactaggccatgctttacaagatctagatagcgtaccattagaaaatgtagaggatagtactgatgaggatgctcctttaaacagcccaggatcagaaggaagcacgctgtcttcagatctcatgaagctttgtggtgaagtgaaacctaagaacaaggcccgaaggagaaccaccactcagatggaattgctgtatgcagatagcagtgaactagcttcagacactagtacaggagatgcctccttgcctggccctctcacacctgttgcagaagggcaagagattggaatgaatacagagacaagtggtacttctgctagggaaaaagagctctctcccccacctggcttaccttctaagataggcagcatttccaggcagtcatctctatcagaaaaaaaaattccagagccttctcctgtaacaaggagaaaggcatatgagaaagcagaaaaatcaaaggccaaggaacaaaagcactcagattctggaacttcagaggctagtctttcacctccttcttccccaccaagccggccccgtaatgaactgaatgtttttaatcgtcttactgtttctcagggaaacacatcagttcagcaggataagtctgatgaaagtgactcctctctctcggaggtacacagatcctccagaaggggcataatcaacccatttcctgcttcaaaaggaatcagagcttttccacttcagtgtattcacatagctgaagggcatacaaaagctgtgctctgtgtggattctactgatgatctcctcttcactggatcaaaagatcgtacttgtaaagtatggaatctggtgactgggcaggaaataatgtcactggggggtcatcccaacaatgtcgtgtctgtaaaatactgtaattataccagtttggtcttcactgtatcaacatcttatattaaggtgtgggatatcagagattcagcaaagtgcattcgaacactaacgtcttcaggtcaagttactcttggagatgcttgttctgcaagtaccagtcgaacagtagctattccttctggagagaaccagatcaatcaaattgccctaaacccaactggcaccttcctctatgctgcttctggaaatgctgtcaggatgtgggatcttaaaaggtttcagtctacaggaaagttaacaggacacctaggccctgttatgtgccttactgtggatcagatttccagtggacaagatctaatcatcactggctccaaggatcattacatcaaaatgtttgatgttacagaaggagctcttgggactgtgagtcccacccacaattttgaaccccctcattatgatggcatagaagcactaaccattcaaggggataacctatttagtgggtctagagataatggaatcaagaaatgggacttaactcaaaaagaccttcttcagcaagttccaaatgcacataaggattgggtctgtgccctgggagtggtgccagaccacccagttttgctcagtggctgcagagggggcattttgaaagtctggaacatggatacttttatgccagtgggagagatgaagggtcatgatagtcctatcaatgccatatgtgttaattccacccacatttttactgcagctgatgatcgaactgtgagaatttggaaggctcgcaatttgcaagatggtcagatctctgacacaggagatctgggggaagatattgccagtaattaaacatgaatgaagataggttgtaaactgaatgctgtgataatactctgtattctttatggaaaatgttgtcctgtacttactaggcaaaacgtatgaatcggattaactggaaaatatatctgaattcaactgctgactataaatggtattctaataaaattgtgtactatcctgtgtgcttagttttaagatcaaccaatagatatatatcctacaattgatatattgctttattcacacttttattgtggctgaatttttgtgcctatctataaaacacactttcaaattatttgaattaccaagacgtctgcttttgtgacagtcagaaaacacacctggaatacgatgcagcccaccattaactcattcatgtagtttattcaagtgatttatgtatttaaactaaatattgaaaatgttagtcaaattgtggtttgcttgtcaggtatttatatcagtctgtagtggattcccaaatttcaaagctcttttaatgtaatggacaaaaataagatatgagaatattattgatgaattttcataaggtggaattgatcttaatctactaacagagaagggtagacagtttgtgttaaatgttggcatttacttgtattgaccaaagttttgcagctctactatattctgtgctcaggactaaaatgctgttaatttttttttttttttccagtgctgtgcatatattctgtgatgggaaacattgttgatgtcctaacagaaatatattttgatctattttcctatggagttgtttctattatgaccatttaattttgtttttatttaatagtagtatttccttcccttttatctaattttttatatgctgctaaatatattttaaatatactatgtttgcgaaccttggtagctatgatgagagctattatcatctgtggtgggaaaagctatgtaaataggtagattgtatagagagactatcttgtgttgtgcctgtatgaatttttaaaagttgttgactggattttgcaaaaggatgtataatatttctgtctgctcagaatattaatttgtaaattctgcaagtttaatttttatgtagatggtataacatttgaaaatattgtcttatgtgattttttcccctgaaaatatttgcttgtaaatgaaaacttagctagggcttaaataaacatgttgctatgaaattaaaaaaaa

SEQ ID NO: 190 - DNA, 4053 bp, Homo Sapiens
ggggagcgactacaactcccagagggtatggcggccgcagcagtgggcagttgagtttccggggcgacccaggtcctccggcggaagcgggagcctctgtcggccgcggaagcctggagtgggcggtacgcagacgcgcgcggtgagacccgctgtctgctcagcggactctgcccgcccccacctccccctgcgtcgggccgacatgaaggactcgctggtgctgctgggccgtgtcccggcgcacccggactcccgctgctggttcctggcctggaaccccgcggggaccctgctggcctcgtgcggcggcgaccggagaatccgcatctggggcacggagggtgacagctggatctgcaagtctgtcctttctgaaggccaccagcgcaccgtgcggaaggtagcctggtccccctgcggtaattacctggcctctgccagctttgatgctaccacttgcatttggaagaagaaccaggatgactttgagtgtgtaaccactctcgagggccatgaaaatgaggtcaagtcagtggcttgggccccatctggcaacctcctggccacttgcagccgagataagagcgtttgggtctgggaagttgatgaagaggatgagtatgaatgtgtcagtgttctcaactcccacacacaggatgtcaagcatgtggtttggcacccaagtcaggagctcttagcttctgccagctatgatgacacagtgaagctgtaccgggaggaagaggatgactgggtatgctgtgccacccttgagggccatgaatccactgtgtggagcttggcctttgacccgagtggccagcgcctggcgtcttgtagtgatgaccgtactgtgcgtatctggcgtcagtatctaccaggcaatgaacaaggggtggcatgcagcggctctgaccccagttggaaatgtatctgtactttgtccggcttccactcaaggaccatttatgacattgcttggtgtcagctgacaggggctctggccacagcttgtggggatgacgcgatccgcgtgtttcaggaggatcccaactcggatccacagcagcccaccttctccctgacagcccacttgcatcaggcccattcccaggatgtcaactgtgtggcctggaaccccaaggagccagggctactggcctcctgcagtgatgatggggaggtggccttctggaagtatcagcggcctgaaggcctctgagctacctcgactttggacagagtaatgactccccagaaaacgtcatataagactttaccagcccctgagaggaccaggaggagcatccttgaccttcatttaacttggctcacttctcttcagacttgggtagaagtgcagagccacagaattgctttccttccccgcctttgacatgaggccttcagtaaagagctacagaacatgagtacattgttataccacagatttttcttgcattagggcacagtgttaaattttttggaggtaaatatactatttataatcactatatatagtaggagggggtatgtgtctcaggcttttctgaagttgcaagacttaaagaaataatccatctgcatcccaagtcctattttataaggatattcataaaaattccatggtgaatccttgtctgaaataggtcctcccttcccagtttctgtgtaagtctttgcatttaagacatccaatcaataatgaaggaaatttttttctgaatgtaggtttgagtgaggggcacctctgctttcccttagcaaccctcatatacctccctgcaccgttacgctgtgatggcaactggggatagaaaaaaaatggggaaagacaggaatcctaaaagggagagttattactggccacaagccctgtattctcaacagggatgcaaattggttcttcagtaaggataaaaaaaaatcacaagcagttgtttgtggccctcctaaggcccacagcacatatagtgtgtctgtgatattccattttcatggcagggagtgatcaggaagaaggcttcctaggggactggcgatttaaaccagttgagaaacactgccatcagcaggcagtttcagactcactcaagttgtctcttgacagtcacttctaaatgggttctaatgtgacaatggcctccaaaactacagccttccctgaagtttaagctgtgaccttagattttagaaggacagtggggctgtacctagaatagtggttctcgaagaatgcggcctgcagatcctgggagtcccaagaccctttcagggaggatctgtgaggtcaactgttggcactgtggcatgaatcaaggtggtggcagcaaacttctagtagttttgatatgtccttgatagaacaaatagcaatggttaactattaaatgttgacctagccagcgcagtggctcatgcctgtaatcccagcactttgggaggctgaggcgggcggatcacctgaggtcgggagttcgaggccagcctgaccaacatggagaaaccccgtctcttctaaaaatacaaaattagctgggcatggtggtgcatgcctgtaattccagctactcgggaggctgaggcaagagaatcgcttgaatccggtaggtggaggttgcagtgagccgagatcataccattgcactccagcccaggcaacaagagtgaaaccctgtctcaaaaagaaaaaaaaagttgaccttgagaatttataatattctgagaaaactggaagcatgcataaagcccctctgctgtgcactgaagtatgggtgccttgaggaaaagcagttacacagttgagttgcaagctgaattggctgtgttcaaggcatgccctttagaattgaaagaactagcagattacggtatttagacttgaatatttggctgatattttctggaaattaatggaatgagcctctcacctcaagggaaacaactgatagtgttgccagtgataaagctttcaagcaaaaattggaatttccgaaaatctgtactccaccatgagctttattgttggggatattaacaaatgtgatttgtataatgaaatgcatttcatttggaagaattcaatgaaccatttttccaagtgaccagtacgtgatgttacaaaatcatgcatggctcaaagattgattcaaaagtgtaagacaggccagtggattttaatgtattaacaatataagagtgcattaagttttcggagtctacattgcctttaagaaactatgacttgtagtaagccgggcgcggtggctcacgcctgtaatcccaacactttgggaggccaaggtgggtggatcacaaggtcaggagttcaagaccagcctggccaatatggtgaaagtccgtctctactaaaattacaaaaattagccgggcgtggtggcagatcccttgtagtcccagctactcgggaggctgaggcaggagaatagcttgaacccgggaggtggaggttgcagtgagtcgagatcgtgccactggactccagcctgggtgacagagcgagactccatttcaaaaaaaaaaaaaaaaaaaaaaaatcacttgtagtcttggtgtggtatcaaagaatagccacaattagctgaaaaggctattttaaaaacttttccaactgcgtatctgtgtgaagtcaacttacttcaacaaaaaagtttggatgtagaagcagctgtaagaattcaactgtttattataacaagatactaaagagactgtaaaatgccacccttctccttggattgttttggaagttattcttcataaaaaatgttaacgtgggctgggcatggtggctcatgcctgtaatcccagcactctgggaggctgaggtgggcggatcacttgagctcaggaattcaaggtcagcctgggcaacatggctaaactctgtctctattaagaaaaaaaatgttaacattatgatttaaaagtgcattaaccttaatctagataataaaagctttttggggcaacctccagaactgtgaaaaataaatttgttatttaaaaagaaaaaaaaaaaaacaaaaa

SEQ ID NO: 191 - DNA, 6010 bp, Homo Sapiens
ccgcggagggagcgagctaggagcgtccacgcccaacgcagtcaccgtcccacggcctcagagagcgaaccgcggctccaccgtcggcggggcgacccccccctccggaccccgcccgcaccccgccccccctccgccgccgtcgcggcggcggggccaggcggcccgagccgtgcagtcggaggtccttgtgcatgaagacagatttgttctatggcctcggagttgggtgccagggatgatggaggctgcactgagctggcaaagcccctctatcttcagtacttggagagggccctccggttggaccattttctgcgacaaacgtcagctatcttcaataggaatatttctagtgatgacagtgaagatggactggatgacagtaatccattattgccccagtctggggatcccttaatacaagttaaggaagaacctccaaattcattgcttggtgaaacttctggagcaggcagttctggaatgttaaacacatattctctgaatggagttctacagtcagaatcaaaatgtgataaggggaatttatataatttctctaagctgaagaaaagcagaaagtggctaaagagcattctgctaagtgatgaatccagcgaggctgattctcagagtgaagacgatgatgaagaagaactcaatctcagcagagaagaacttcacaacatgcttcgactacacaaatataagaaacttcaccaaaataagtatagtaaagacaaggagttgcagcaatatcagtactacagtgcaggcctgctctccacatatgaccctttctatgagcaacaacggcacctacttggacccaagaaaaagaaatttaaggaggaaaagaaacttaaagctaagttgaaaaaagtgaagaaaaaaagacgaagagatgaagaactttcctctgaagaatcccctcgtcgccatcaccaccagaccaaagtctttgccaagttttctcacgatgcacctccccctggcactaagaaaaagcacttatccattgagcagctgaatgctcgtcgcaggaaagtatggctcagcattgtgaaaaaggaactaccaaaggcaaataagcagaaagcttcagctcgtaacctgtttctcaccaatagccgaaagcttgctcaccagtgcatgaaggaggtgcgtcgagctgccttgcaggcccagaagaactgtaaggaaaccttgcctcgtgcccgccgcctcaccaaggagatgcttctgtactggaagaaatatgagaaagtagagaaggagcaccgcaagagagcagagaaggaagctttggagcagcggaagttggatgaggaaatgcgggaggccaagaggcaacagcgaaaactcaacttcttaattacccagacagagttgtatgcccatttcatgagtcgcaaacgagatatgggtcatgatggtatccaggaagaaatcctaaggaaactggaagacagttctacccagagacaaatcgatataggtggaggagtggtagttaacatcacacaggaggattatgatagtaaccattttaaagcccaggccctgaagaatgctgaaaatgcttaccatattcaccaagctcggacaaggtcatttgatgaagatgcaaaagaaagtcgagcagctgccctacgggcagcaaacaagtctggcactgggtttggggagagttatagcctggctaacccatctatccgggctggtgaggatattccacagcccacaatttttaatggcaaattgaaaggttatcaactgaaaggcatgaattggttggccaatctatatgaacagggtattaatggcattcttgctgatgaaatgggccttggtaaaacagtacagagcattgcccttctggcccatctggctgagagagagaacatttggggacctttcttaataatttcacctgcgtctacacttaacaattggcaccaggagtttactagatttgttcctaaatttaaggtgctaccatattggggaaatcctcatgatagaaaagtcatcagaaggttctggagtcagaagaccctctacactcaggatgcccccttccatgtggttattaccagctatcagctggtggtgcaggatgtaaagtatttccagcgggtcaagtggcaatacatggtactggatgaggctcaggcgctcaagagtagttccagtgttcgttggaagatcctcttacagttccagtgtcggaatcggcttttgctaaccgggaccccaattcagaacaccatggcagagctttgggctctgctgcatttcattatgccaacattatttgattcacatgaggaatttaatgaatggttttccaaggacattgagagccatgccgaaaacaaatctgctattgatgagaatcaactttctcgcttacacatgattttgaagccatttatgctgaggagaatcaagaaagatgtggaaaatgaattatctgacaagattgagattctaatgtattgccaactgaccagccgacagaagctgctatatcaggcactaaagaacaaaatttccattgaggatttattgcagtcttctatgggctctacccaacaagcacagaacaccaccagcagcctcatgaatctggtcatgcagtttaggaaggtgtgtaatcacccggagttatttgaacggcaagaaacttggtctccatttcatatttccctaaagccataccacatttcaaagtttatctaccgtcatggacagatcagggtcttcaatcattcacgagacaggtggttaagggttctttctccatttgcaccagactatatccaacggtctctctttcacagaaaaggtattaatgaagaaagctgtttctctttccttcgctttattgatatatctccagcagaaatggcaaaccttatgcttcagggacttttggccagatggttagctcttttcctgtctctgaaagcctcctacaggctccatcagctacgctcctggggagcgccagaaggggagagccaccagagatacctgaggaacaaggatttccttcttggggttaattttccactctcctttccaaacctttgcagctgccctttgttaaagtctcttgttttcagcagccactgtaaagcagtgagtggctactcagaccaggttgtccatcagcggagatcagctacctcctcgctgcgtcgctgcctgctcactgagctgccatcttttttgtgtgtggccagtccacgagttaccgcagtgccattggattcttactgcaatgaccgaagtgcagaatatgaaaggcgagttctgaaggaaggagggagtctggcagccaagcagtgtttgttgaatggggcccctgaactggctgcagactggctaaatagacgatcacagttcttcccagagccagctggaggtctgtggagcatcagacctcagaatggctggtctttcatcaggattccaggcaaggagagcctcatcactgacagtggaaagctgtatgcccttgatgtcctgctgactcggctcaagtctcaagggcatagggtccttatctactcccagatgaccaggatgatagacctactggaggaatacatggtttacaggaagcatacctacatgaggcttgatggctcatccaagatctcggagaggcgagacatggttgctgattttcagaacaggaatgacatctttgtgttcctgttaagcacacgagctggaggactgggtatcaatctcactgctgcagacacagtgattttctatgatagcgactggaaccccactgtggaccagcaggccatggacagggcccaccgcttagggcagacaaagcaggttactgtgtaccggctcatctgtaaaggcaccattgaagaacgcattctgcaaagagccaaggagaagagtgagattcagcggatggtgatttcaggtgggaacttcaaaccagataccttgaaacccaaagaggtggttagtcttcttctagacgacgaagagttggagaagaaactgaggctgcggcaggaagagaaacggcaacaggaggaaaccaaccgagtgaaagagcgcaagcggaagcgggaaaagtatgcagagaagaagaaaaaagaagatgaattggatgggaaaaggagaaaagagggtgtgaacctggtgatcccatttgttccctcggctgataactccaacctctctgctgacggagatgactccttcattagcgtggactcagccatgccaagccctttcagtgagatctccatcagcagtgagctgcacactggctccattcccctggacgagagcagcagtgacatgctggtcattgtggatgacccagcctcctcagcccctcagtctcgagctaccaactctcccgcatccataacaggctccgtctcagataccgtgaatggaatttccattcaggaaatgccagctgcaggacgtggtcactcagcccgaagccgaggccgccccaaaggttcaggaagcacagccaaaggagcagggaagggccggagccgaaagtccacggcaggcagtgctgctgcaatggcaggagccaaagccggggctgcagcggcctctgcagctgcctatgccgcatacgggtacaacgtgtctaaaggaatctccgccagcagtcctctgcagacatcccttgttcggcctgctggccttgctgactttggaccttcaagcgcctcttctcctttgagttcccctttgagcaagggaaataatgttcctgggaatcccaagaacctccacatgaccagcagcctagccccagactctctggtccggaaacagggcaaaggcaccaacccctctggaggacggtaaccatctgggccctccgacttccttcaaccaaaccagggctagagtcctgacctgccagtggtctttggatggcttgccccgtgcagcatcttgcatcctgagtcagaagtggaaatgtccagcaggggaaggacaggcaggtggatggtgtgagcacttttatcatctgtgtctcatcaggagcatctggggtgcctgtaggaggaaggccacagggcatggatcagccccactgcatctcaagtgaactgtatagccaagtcttaaacctctcacggggcaagcctgacacagaccccctttagatgctcaggcatactgtttccatcccgattccactcttcggctctgacacgtcccttgcaaagtctccgcaggtgctgtgaagagccttccatggtagagatttctcttaagagtgtgatttctcatagggctagtaagggagattgtatacctgttgtccacagtcttcaggcagctccccaggtctctgaaccccagagtgtcatcattggagagagcagtgactgcgagagatggtggaggccgctaagcatggtagaggctagaggaagtctatccacaggcagttgtgttcccagcaattcctcccatcctgcatggttcacaccaagagaaccttcagatcctaccagcaaccgtagcaccttccacccaggggactcccagaagccagtaaagagaccaggagccacctcaatcagcagtgtttgcatgggaggtgtttctgcctgtccctgcctgatgtccctggtggagcaggtacctccgggcgggcaagcctctgatttgcacacctgaaaatcgcggaattgagtttcgatagattgatttttaaaacttttttggagtagggggtataggggaatcatttaatttaaatcattaagattcccctgctcaaacccagattcctgtgtacagatgctatttagagggaatcagaaaaatgccaagccttttctctttgaatgtgctatttttataactgaacttgtacatatgtataaagagagacacatcttccttttactaactggataaaaaaatcttaaataaaatggagtgagataattttatgtaaaaaaaaaaaaaaaaaaaa

SEQ ID NO: 192 - DNA, 3007 bp, Homo Sapiens
ggctcgcactttaagacttcccgagcggcggcggggacgccagtcgagccgggagacgcttacctgccgcttccccgcgccgcccggtgcacctggccgcaagggacctcgttctcagggaagacggcgacattccgcggaggtggaaccgccgcgcgccgtccgggctcggaccttccccggaacgtgggggcgccttagcgactccttccctgttgtgcccccgttcccggcgttcagcccggccccgcaaaggtgggacggctcccggcttcagttacggaagcggcccgtgtccagcgacgagggttcgaaaatgccccgcgcgttcctggtgaagaagccgtgcgtctccacgtgcaagaggaactggagcgagctccccgacgaggagcgcggcgagatctacgtgccagtcagcctgggcttctgcccaccacagccctaccgggagccggaaccctctgtggccgaacccccttcctgcccgctggctttgaacatgagccttcgagactctagctacagcatggcccccgggccctgtgtggtggcccagctgccctctgaagacatgggccacttgacagacccccagagcagagaccatggcttcctgcgcaccaagatgaaggtgacccttggggacagtcccagtggagacctgttcacctgccgtgtctgccagaaggccttcacctaccagcgcatgctgaaccgccacatgaagtgtcacaacgacgtcaagaggcacctctgcacgtactgcgggaagggcttcaatgacaccttcgacctcaagagacacgtccgaactcacactggcgtgcggccctacaagtgcagcctgtgtgacaaggccttcacgcagcgctgctctctggagtctcacctcaagaagatccatggtgtgcagcagaagtacgcgtacaaggagcggcgggccaagctgtacgtgtgtgaggagtgcggctgcacatctgagagccaggagggccacgtcctgcacctgaaggagcaccaccctgacagcccgctgctgcgcaagacctccaagaaggtggccgtggcactacagaacactgtcacttccctgctgcagggcagcccccacctgtgagtggctcgagccctgggggtgctcctggaagccccaagagcatccaggattgcctcccagctgcctggccagcccaccctcctgcaacctctcacccgaacaccagtgatcaggactggagcccccgtgccttggtctcccccctgggcacacgtgctcactcaggcccagcaatgacctctgctcatttttgcatttttgacttatgggccgaggctgttctgagcctgggaagatgtacctatgtcaagagaagggatgaggccaaggctgccttcaattagaagcagccgcccacagagacaggcactgtgtgcctggcagcaggacttcctacccagaggaggttcgagctaggatcccactgcccccgcctctcagcacagggcaggggctgcaggtccccagtggacatcagagtcaaaagcactggcaaagggtacccctgcaaacaactgtggtgggggctggcagcagaccccccacctggcagggcttctaatgctcagggttctggagggctctgtccttccggcaaggagaggcacacatgtgtgcccagccgtgtgtgtgcgtgtgcttgtgtgtgtgcactgctgtgtgtgtgtgcacgcacaggaagcctttccacatatcacctcatttctaagaaataaactacaaggtgccaagaaggttttatttccttttattttttaaagatgacaaatgtacagatgttaatatatttttggtgccaatggcgatgtttttaagagtgggatggagctggcttttctccattcccgtgcgcttctatttatcctggacatttcaaacctcctctgtgccttggctctgggcgggggctgccccaacccacccccgttctttgtacgtgctgagacagccactagaagatcttcctccagcggcgccctggacggctgctcctgcgaacagcccatggcatcttctgctcttccctcccggctctgccctgcacatcctgttgagccaagccccagtgacccggagagctggcctgatgctgagagtgtgtcctcctggggctttagggggcaggaaggtgggacgaatgacgatgcccatccactacctgaagcactaggacactcttgcagggccaggctggaagaccggcccttttcttggttgagtcaaaagccttagcacagtggcaaaaaatgggacagaatgatgaccagcacctcagaaacttccagagggaggagaggatttgatggctaccaaattgtatctgttgccttttttctgactttttcacctgaccaggctggggtttggagtggctgtggggagacccgtcctggctggctggctggctcccttgctcccttgctgcagctgggaaaggggttctgggtgtaaagaggtgtgcgtcttgtgggccaaagggaaaaacaggcaggggtcagagccagcctgccagaggcaaatgcaaaagaggtccccagaacacagccagctgggcagccccttaaagccaaaccccacctgaagcagaaccactttggcctcccctgcccaaaatgggtagtgtctacacgtccccgggctcaggctcaggcccagccctgggctgacctgagaggaaggctccttcctggactgccctctgaaatgtgtatagattgattctaaaatctcttgtttcacttgactttagagtgtctgggacgctgctgtattctgaaagtcacatagcacacagtaatgttatctggaagctctgtttttgtttacatttctgtatccctgggttgactgccaatccgaggccgtcatgaagctctgtgttgtctgttttattttataaccttcctctcaactattaaaattagagatctaaaaaaaaaaaaaaaa

SEQ ID NO: 193 - DNA, 6751 bp, Homo Sapiens
gccaggccgcgtccgccatagtacctggcttggaggtgtcgccgccgctcggtgagagcccccgagcggcagggggccaacacaaaaagggagccggagaagccctagccgctgcccagcagcttgcgggcgtgttctcgcggttccgggcctcaaggcgacggaaacgaaaggcgagcgaagcgcggaggatccggcgagaagaagcgtcagggagcctcggcggtgtccccggggtccgccgaagccacccggccgccggctggggcccggggtggtgaggaagtgctccgaggcctcgccgaggcctagcgccggctttgtgtccgaggcggcggcggcggcggggggaggcggagccgggggcggcctgcgggaaggcctctcctccgccgaccgcgcgttttcggcctaggccgtggggccgctcgtggcctccggggagcaggcgccaggggtttgtgtgcggtgggggcctgggcctgggcctggggaagctgacgccggtcgtccggaagccaggaggaggcgtgaggccgctcgtggactccgggcctaggccctctcccctcaaccttctcccggggcctgggtcaccccaatccacggagagagagacccgccgggaggtgcggccgcgctatggacccctgaccccgtggggtcgctcggactcttaacgtgtggactgaccgctactgactgcaccgccaatccccccgtctctgccggccccttagcatgagcgagggggacccagccgggtgacattgtgcccgttggcggattctcgatttcccctcttccccgtcctcgtcctcctcctcccccatgaagtgattctgagtatcggggggtctctggattattgttctgacgaacccctgcttgtggttggggggtatttaatctgaggccttagggtccttcggtgtctttgagtgttttgtgtgtacatattttgctcttaaagtttataaatatacgtatattgagagtgtccacgtctcctcgctgaaccttaggaatcccttggcaccatgtcctgtgtgcattataaattttcctctaaactcaactatgataccgtcacctttgatgggctccacatctccctctgcgacttaaagaagcagattatggggagagagaagctgaaagctgccgactgcgacctgcagatcaccaatgcgcagacgaaagaagaatatactgatgataatgctctgattcctaagaattcttctgtaattgttagaagaattcctattggaggtgttaaatctacaagcaagacatatgttataagtcgaactgaaccagcgatggcaactacaaaagcaattgatgactcttccgcgtctatttctctggcccagcttacaaagactgccaatctggctgaagccaatgcttctgaagaagataaaattaaagcaatgatgtcgcaatctggccatgaatacgacccaatcaattacatgaagaaacctctaggtccaccacctccatcttacacgtgtttccgttgtggtaaacctggacattatattaagaattgcccaacaaatggggataaaaactttgaatctggtcctaggattaaaaagagcactggaattcccagaagtttcatgatggaagtgaaagatcctaatatgaaaggtgcaatgcttaccaacactggaaaatatgcaataccaactatagatgcagaagcatatgcaattgggaagaaagagaaacctcccttcttaccagaggagccatcttcttcctcagaagaagatgatcctatcccagatgaattgttgtgtctcatctgcaaggatattatgactgatgctgttgtgattccctgctgtggaaacagttactgtgatgaatgtataagaacagcactcctggaatcagatgagcacacatgtccgacgtgtcatcaaaatgatgtttctcctgatgctttaattgccaataaatttttacgacaggctgtaaataacttcaaaaatgaaactggctatacaaaaagactacgaaaacagttacctcctccaccacccccaataccacctccgagaccactgattcagaggaacctacaacctctgatgagatctccgatatcaagacaacaagatcctcttatgattccagtgacatcttcatcaactcacccagctccgtctatatcttcattaacttctaatcagtcttccttggcccctcctgtgtctggaaatccgtcttctgctccagctcctgtacctgatataactgcaacagtatccatatcagttcattcagaaaaatcagatggaccttttcgggattctgataataaaatattgccagctgcagctcttgcatcagagcactcaaagggaacctcctcaattgcaattaccgctcttatggaagagaagggttaccaggtgcctgttcttggaaccccatctttgcttggacagtcattattgcatggacagttgatccccacaactggtccagtaagaataaatactgctcgtccaggtggtggtcgaccaggctgggaacattccaacaaacttggctatctggtttctccaccacaacaaattagaagaggggagaggagctgctacagaagtataaaccgtgggcgacaccacagcgaaagatcacagaggactcaaggcccgtcactaccagcaactccagtctttgtacctgttccaccacctcctttgtatccgcctcctccccatacacttcctctccctccgggtgttcctcctccacagttttctcctcagtttcctcctggccagccaccacccgctgggtatagtgtccctcctccagggtttcctccagctcctgccaatttatcaacaccttgggtatcatcaggagtgcagacagctcattcaaataccatcccaacaacacaagcaccacctttgtccagggaagaattctatagagagcagcgacgactaaaagaagagtctaaatctccctatagtggttcttcgtattcaagaagttcatatacttattctaaatcaagatctggttcaacacgttcacgctcttattctcgatcattcagccgctcacattctcgttcctattcacggtcacctccataccccagaagaggcagaggcaagagccgcaattaccgttcacggtctagatctcatggatatcatcgatctaggtcaaggtcacccccttacagacgctatcattcacgatcaagatctcctcaagcgtttaggggacagtctcctaataaacgtaatgtacctcaaggggaaacagaacgtgaatattttaatagatacagagaagttccaccaccatatgacatgaaagcatattatgggagaagtgttgactttagagacccatttgaaaaagaacgctaccgagaatgggagagaaaatatagagagtggtatgaaaaatattataaaggttatgctgctggagcacagcctagaccctcagcaaatagagagaacttttctccagagagatttttgccacttaacatcaggaattctcccttcacaagaggccgcagagaagactatgttggtgggcaaagtcatagaagtcgaaacataggtagcaactatccagaaaagctttcagcaagagatggtcacaatcagaaggataatacaaagtcaaaagagaaggagagtgaaaacgctccaggagatggtaaaggaaataagcataagaaacacagaaaaagaagaaaaggggaggaaagtgagggttttctgaacccagagttattagagacttctaggaaatcaagagaacctacaggtgttgaagaaaataaaacagactcattgtttgttctcccaagtagagatgatgccacacctgttagagatgaaccaatggatgcagaatcaatcacttttaaatcagtgtctgaaaaagacaagagagaaagggataaaccaaaagcaaagggtgataaaaccaaacggaagaatgatggatctgctgtgtccaaaaaagaaaatattgtaaaacctgctaaaggaccccaagaaaaagtagatggagaacgtgagagatctcctcgatctgaacctccaattaaaaaagccaaagaggagactccgaagactgacaatactaaatcatcatcttcctctcagaaggatgaaaaaatcactggaacccccagaaaagctcactctaaatcagcaaaagaacaccaagaaacaaaaccagtcaaagaggaaaaagtgaagaaggactattccaaagatgtcaaatcagaaaagctaacaactaaggaagaaaaggccaagaagcctaatgagaaaaacaaaccacttgataataagggagaaaaaagaaaaagaaaaactgaagaaaaaggcgtagataaagattttgagtcttcttcaatgaaaatctcgaaactagaagtgactgaaatagtgaaaccatcaccaaagcgcaaaatggaacctgatactgaaaaaatggataggacccctgaaaaggacaaaatttctttaagtgcgccagccaaaaaaatcaaactcaacagagaaactgggaagaaaattggaagtacagaaaatatatcaaacacaaaagaaccctctgaaaaattggagtcaacatctagcaaagttaaacaagaaaaagtcaaaggaaaggtcagacgaaaagtgactggaactgaaggatccagctcaactctggtggattacaccagtacgagctcaactggaggcagtcctgtgcggaaatctgaagaaaaaacagatacaaagcgaactgtgattaaaacgatggaagaatataataatgacaataccgcgccagctgaagatgttatcattatgattcaggttcctcaatccaaatgggataaagatgactttgaatctgaagaagaagatgttaaatccacacagcctatatcaagtgtaggaaaacctgctagtgttataaaaaatgttagtacaaagccatcaaatatagtcaagtatcctgagaaagaaagtgagccatccgagaaaattcagaaattcaccaaggacgtgagccatgaaatcatacaacatgaggttaaaagttcaaaaaactctgcatctagtgaaaaagggaaaaccaaagatcgagattattcagtgttggaaaaggagaaccctgaaaagaggaagaacagcactcagccagagaaagagagtaatttggaccgtctgaatgaacaaggaaattttaaaagtctgtctcaatcttccaaagaggctagaacgtcagataaacatgattccactcgtgcttcctcaaataaagacttcactcccaatagagacaaaaaaactgactatgacaccagagagtattcaagttccaaacgtagagatgaaaagaatgaattaacaagacgaaaagactctccttctcggaataaagattctgcatctggacagaaaaataaaccaagggaagagagagatttgcctaaaaaaggaacaggagattccaaaaaaagtaattctagtccctcaagagacagaaaacctcatgatcacaaagccacttatgatactaaacggccaaatgaagagacaaaatctgtagataaaaatccttgtaaggatcgtgagaagcatgtattagaagcaaggaacaataaagagtcaagtggcaataaactactttatatacttaacccaccagagacacaggttgaaaaagagcaaattactgggcaaattgacaagagtactgtcaagcctaaaccccagttaagtcattcctctagactttcctctgacttaactagagaaactgatgaagctgcttttgaaccagactataatgaaagtgacagtgaaagtaatgtttctgtaaaagaagaggaatcttcaggaaacatttctaaggacctgaaagataaaatagtggagaaagcaaaagagagcctggacacagcagcagttgtccaggtgggcataagcaggaatcagagccacagcagccccagcgtcagccccagcagaagccacagtccttctggaagccagacccgaagccacagtagcagtgccagctcagcagaaagtcaggacagcaagaagaagaagaaaaagaaggaaaagaaaaaacacaagaaacataaaaagcataagaagcataagaaacatgcaggcactgaagtggaattggaaaaaagccaaaaacacaaacacaagaaaaagaagtcaaagaagaacaaagataaagagaaggagaaggagaaagatgaccaaaaagtgaaatctgtcactgtgtaaaaagacagattttttaaattgacttaattactaagtcatctgtattaaattttgttataatgtaaagagattcaagccttgtaaataatgacatggaagaccctgtgctgcacttaaaatattgctgcttgattatttgatttttacatcagagctttataacacgaacttttgtacagaattgtgagttgtgaccatgtaacatgagaggttttgctagggcctattatttttaaccaccattaattagttggggtggagtttactgtaatgtgaaattttcacatttgaattttttaattgcctggcaaaagctgatataagttctaaaatatcagcagaatgatttgctgaattcattacaaccctgttatgtcactttttgattacaataaaagttttcagtaaacttttcaaaaaaaaaaaaaaaaaaa

SEQ ID NO: 194 - DNA, 3493 bp, Homo Sapiens
ggccgagctggagctggaagaggacgaggaggagggggaggaagcggagctggacggagacctgctggaggaggaggagctggaggaagcagaggaggaggaccggtcgtcgctgctgctgctgtcgccgcccgcggccaccgcctctcagacccagcagatcccaggcgggtccctggggtctgtgctgctgccagccgccaggttcgatgcccgggaggcggcggccgcggcggcggcggcgggggtgctgtacggaggggacgatgcccagggcatgatggcggcgatgctgtcccacgcctacggccccggcggttgtggggcggcggcggccgccctgaacggggagcaggcggccctgctccggagaaagagcgtcaacaccaccgagtgcgtcccggtgcccagctccgagcacgtcgccgagatcgtcggccgccagggttgtaaaattaaagcactgagagccaagacaaacacgtatatcaagactcctgttcgtggtgaagagcccatttttgttgtcactggaaggaaagaagatgttgccatggccaaaagagagatcctctcagctgcagagcacttctccatgattcgtgcatctcgaaacaaaaatgggcctgccctgggaggattatcatgtagtcctaatctgcccggtcaaaccaccgtccaagtcagggtcccttatcgtgtggtaggattagtggttggacccaaaggagcaactattaaaagaattcagcagcagacccacacctacatagtaactccgagcagagataaggaacctgtctttgaagtgacagggatgcctgaaaatgttgaccgagcacgggaagaaatagaaatgcatattgccatgcgtacaggaaactatatagagctcaatgaagagaatgatttccattacaatggtaccgatgtaagctttgaaggtggcactcttggctctgcgtggctctcctccaatcctgttcctcctagccgcgcaagaatgatatccaattatcgaaatgatagttccagttctctaggaagtggctctacagattcctactttggaagcaataggctggctgactttagtccaacaagcccatttagcacaggaaacttctggtttggagatacactaccatctgtaggctcagaagacctagcagttgactctcctgcctttgactctttaccaacatctgctcaaactatctggactccatttgaaccagttaacccactctctggctttgggagtgatccttctggtaacatgaagactcagcgcagaggaagtcagccatctactcctcgtctgtctcctacatttcctgagagcatagaacatccacttgctcggagggttaggagcgacccacctagtacaggcaaccatgttggccttccaatatatatccctgctttttctaatggtaccaatagttactcctcttccaatggtggttccacctctagctcacctccagaatcaagacgaaagcacgactgtgtgatttgctttgagaatgaggttattgctgccctagttccatgtggccacaacctcttctgcatggaatgtgccaacaagatctgtgaaaagagaacgccatcatgtccagtttgccagacagctgttactcaggcaatccaaattcactcttaactatatatatatacataaatactatatctctatatggactcgtaaaggcatgggtataatggtaccccccagtaaacttcctaatgatttcttatgactgttatcaggctttattgggattaggctaaagttgttagtaaacttataaaaggctgctatggtaacactaaacctaagtggtctcttgtctattagtttggtttgaattattagtactatcctgtagacccagagacatagtttatataagaattgctaaagctgaagttcaacttggctgagtgaagataatcataggttgtgtgagcctatgaaaaagtgtatacgtctaagatttcaaaacaatgggtcccaaagcctaaccactttaagagtttatggagggtacttggcattacagacgattcatacacttccagtgctgccttctttacactgccagttttgacaaaacaggtttgttttttattttacaacaacatatgcctaattctgcaggattgcaagtaactttttaatgcattgtgattacttattggtaatgatagggctgatggcagtttactagatcactggttataatttgggacaaaaactgctacatcaactttcatctcgcccagagtgctcaaggctggtatgatcagtggatcaggaatgcaattgtgaattcctgcccattgcctctcttggtgaatgtggaaatggccacctgggttttcccatatcaggaagggctttgggatggcacctatattggctgataattgaggatgcaaacattccattcattagtgtgatcgagctgttaatttttagactatagatcaaaatgtgaaacattttatgttcaatccatatttgtcttgcacattataaatatatttttattttttagtaatttaggggagggaggagggagaaagggataatgatgcccttggcataattcacaaaagcagctgtgacaacctccaatcagtttacttcatttcaaaactatttccaatcacaaggaaagatttatttaaaatatactcgtacatttcacctgtggatgtctataacttcatcctcagtatgttcccaaatctgtgctggcattgaaaggacaaaacattatactagtgggtttttctactaattattttttgaagcattattttcccaacacaaaagagcttttttctcggtataatgaaaattgaaatcctatgtgtattcaatagtaaatagacaaattttattttttatttccacttgaagagttacatttcgtataaaagtttacaaataacggtttttattttgattttttcagtataaaaaaagttgccttgatggcatattatgatgtaatgctaattgcttgtaggatagtaaatggtcagtattgaaacctaatctctagctgccgtcttgtagatatgaacgaatgttcaccaagcatgtattttgtattttgttgcattgtacactgcaactaataagccaaggaatcgacatatattaggtgcgtgtactgtttctaaaaaccacaaactaagaatgataaattatcaatatagtttagtatttgctaattttactacactcttttgttatgtatatgtagggaagtcatagggattataaattcaatttgagtaaaatttaaaaccatatattttatgataaagggcctttaacttaagatggccaaagcactgatattatatatttgctgtaaagagaattataagagttttatttttctgatattaaaagttacttgataaagacttgtttccattaacttgaaaaaaaaaaaaaaaaaaaaaa

SEQ ID NO: 195 - DNA, 1334 bp, Homo Sapiens
gtgggaaaagatggcggctgccgcacaatcccgggttgtccgggtcctgtcaatgtcacgttctgccattactgcaatagccacatctgtgtgtcacggcccaccctgtcgccagcttcatcatgccctcatgcctcatgggaaaggtggacgttcctcagtcagtgggattgtggccactgtgtttggagcaacaggattcctggggcgatatgttgtcaaccaccttggacgcatggggtcacaggtaatcataccctatcggtgtgataaatatgacatcatgcaccttcgtcccatgggtgacctgggccagcttctgtttctggaatgggacgcgagagataaagattctatccgacgagtagtacaacacagcaatgtggtcatcaatcttattggacgagactgggaaaccaaaaactttgattttgaggatgtttttgtgaagattccccaagcaattgctcaactgtccaaggaagctggagttgaaaaattcattcatgtttcacatctgaatgcgaatattaaaagctcttctagatatttgagaaataaggctgttggagagaaagtagtgagagatgcatttccggaagccattatcgtaaagccgtcggacatctttggaagagaggatagattccttaattcttttgcaagtatgcatcggtttggtcctataccccttggttccttgggctggaagacagttaaacaaccagtatatgtcgtagatgtatccaaaggaattgttaatgcagttaaggatcctgatgccaatgggaaatcctttgctttcgttggtcccagtcggtacctccttttccacctggtgaagtacatctttgctgtggctcacagattgttcctcccattccccttgccgctttttgcctatcgatgggtagcaagagtctttgaaataagcccatttgagccctggataacaagggataaagtggagcggatgcacatcacagacatgaaattgcctcacctgcctggcttagaagaccttggtattcaggcaacaccactggaactcaaggccattgaggtgctgcggcgtcatcgcacttaccgctggctgtctgctgaaattgaggatgtgaagccggccaagaccgtcaacatttagtgcctcctgagcagctcttggttttggcgtcttttgggtcggcccatgtggtttgagcacccagccaggcggtctctttagaggatcctgtacacagttccactattaaaacatttcaggttgaaaaaaaaaaaaaaaaaaaaaaaaaaaaaaaaaaaaaaaaaaaaaaaaaaaaaaaaaaaaaaaaaaa

SEQ ID NO: 196 - DNA, 2960 bp, Homo Sapiens
actccctctctggatgtgtctgctgccgccattgtgcggcgctggtcccctcagagggttcctgctgctgccggtgccttggaccctccccctcgcttctcgttctactgccccaggagcccggcgggtccgggactcccgtccgtgccggtgcgggcgccggcatgtggctgtgggaggaccagggcggcctcctgggccctttctccttcctgctgctagtgctgctgctggtgacgcggagcccggtcaatgcctgcctcctcaccggcagcctcttcgttctactgcgcgtcttcagctttgagccggtgccctcttgcagggccctgcaggtgctcaagccccgggaccgcatttctgccatcgcccaccgtggcggcagccacgacgcgcccgagaacacgctggcggccattcggcaggcagctaagaatggagcaacaggcgtggagttggacattgagtttacttctgacgggattcctgtcttaatgcacgataacacagtagataggacgactgatgggactgggcgattgtgtgatttgacatttgaacaaattaggaagctgaatcctgcagcaaaccacagactcaggaatgatttccctgatgaaaagatccctaccctaagggaagctgttgcagagtgcctaaaccataacctcacaatcttctttgatgtcaaaggccatgcacacaaggctactgaggctctaaagaaaatgtatatggaatttcctcaactgtataataatagtgtggtctgttctttcttgccagaagttatctacaagatgagacaaacagatcgggatgtaataacagcattaactcacagaccttggagcctaagccatacaggagatgggaaaccacgctatgatactttctggaaacattttatatttgttatgatggacattttgctcgattggagcatgcataatatcttgtggtacctgtgtggaatttcagctttcctcatgcaaaaggattttgtatccccggcctacttgaagaagtggtcagctaaaggaatccaggttgttggttggactgttaatacctttgatgaaaagagttactacgaatcccatcttggttccagctatatcactgacagcatggtagaagactgcgaacctcacttctagactttcacggtgggacgaaacgggttcagaaactgccaggggcctcatacagggatatcaaaataccctttgtgctagcccaggccctggggaatcaggtgactcacacaaatgcaatagttggtcactgcatttttacctgaaccaaagctaaacccggtgttgccaccatgcaccatggcatgccagagttcaacactgttgctcttgaaaatctgggtctgaaaaaacgcacaagagcccctgccctgccctagctgaggcacacagggagacccagtgaggataagcacagattgaattgtacagtttgcagatgcagatgtaaatgcatgggacatgcatgataactcagagttgacattttaaaacttgccacacttatttcaaatatttgtactcagctatgttaacatgtactgtagacatcaaacttgtggccatactaataaaattattaaaaggagcactaaaggaaaactgtgtgccaagcatcatatcctaaggcatacggaatttggggaagccaccatgcaatccagtgaggcttcagtgtacagcaaccaaaatggtagggaggtcttgaagccaatgagggatttatagcatcttgaatagagagctgcaaaccaccagggggcagagttgcatttttccaggctttttaggaagctctgcaacagatgtgatctgatcataggcaattagaactggaagaaacttccaaaaatatctaggtttgtcctcattttacaaatgaggaaactaaactctgtggaagggaaggggttgcctcaaaagtcacagcttagctgggcacagtggctcatgccgataatcccagcaattcagaaagctgaggcaggaggattacttgaggccagactgggcaatatagcaagaccccatctctaaaaaattaggcatggtggtgcatgcctgtattcccagctactcaggaggttgaggtgggaggatcacttgagcccagaagttcaaggctgcaatgagccatgattacaccacggcactacaaccttggtggcacagtgagaacctgactcttaaaaaaaaaaaaaaaaaaaaaaaaaaaaagataactagaacttctagaacatcttgtttacagttagccagaaactatacaagtggtttaacatgcattatcttactcaatccatacaaaagtcttatggaggtgttagcactctttctactgatgaagaactgaggtacttcataaaaccacttacccaaggtgtcttgagtctggtacaactggcattcaaatctaggtcagtctgcccccagagccactacccttacccctcactgaatctgcctttatattgttgagcccatgaccccaaactgctctttccaatttgaacttccagggattttattgtgaacttacatagcaacattaaaatgaagttgaattgtttttaatggcaacgccgtctgtctcctctagcttaccgcttctcacctttcaaccccatctgtggcctttgtccaggcccacagcttagccatggcttccctcctgcatccctgccgtgggttgctggcctcacacttgcagcagctggacagtgattttagaaggccaccagtccccatagctatgtgacaatgagaagcaaacttttttgtgacagattgtattggcataggcatgatagatggggattggtacgttttgaatcagcatttgcaaaaaaattgtcttgaattttaaaataaacaacaaagatttgttcattgagtgcaaaaaaaaaaaaaaaaaaaaaaaaa

SEQ ID NO: 197 - DNA, 3425 bp, Homo Sapiens
gcgagctgtcaggccgagtgtcaggccgggcaggtacgcggcgcgcgcccccggcgccccccgctccccgccgggacgccccgcgccgagccggaggccgcgtggacccgaaagccgctgggaaaagtttacccaaggtccagcctagcccctaggcaccatgtcggacagtgatctaggtgaggacgaaggcctcctctccctggcgggcaaaaggaagcgcagggggaacctgcccaaggagtcggtgaagatcctccgggactggctgtacttgcaccgctacaacgcctacccctcagagcaggagaagctgagcctttctggacagaccaacctgtcagtgctgcaaatatgtaactggttcatcaatgcccggcggcggcttctcccagacatgcttcggaaggatggcaaagaccctaatcagtttaccatttcccgccgcgggggtaaggcctcagatgtggccctcccccgtggcagcagcccctcagtgctggctgtgtctgtcccagcccccaccaatgtgctctccctgtctgtgtgctccatgccgcttcactcaggccagggggaaaagccagcagcccctttcccacgtggggagctggagtctcccaagcccctggtgacccctggtagcacacttactctgctgaccagggctgaggctggaagccccacaggtggactcttcaacacgccaccacccacacccccagagcaggacaaagaggacttcagcagcttccagctgctggtggaggtggcgctacagagggctgctgagatggagcttcagaagcagcaggacccatcactcccattactgcacactcccatccctttagtctctgaaaatccccagtaggcatctgccaagaagggtgctgaaggctccagccagctgtcctgggtttccgttttggttccctttcatacagagggttttctatggatcactgccaaacattgggatcatctcctctgtccagaggtcttcaacaggaagatgccagctggcaccactgcactgtgatgggggccctctcctctgctgactctgccgtttctccaggcctccgctcagtgatgagaccaagagatcggagacaagcatggtgctgctgcttctgctgcttctccagaaaatccctgggacacctttgttccagcctggtttcctgggctgggctcaggaaagctgccaaattcagtcctatgttgggtccaagctgcccctgtgctgtttctgtcaagccaggtgtggacattccaagttcatatgcgtgaacaaaagaaaagaggaacccagtggatgtaacagaaccgactccagttgaatgtttagatttttgctaaactgttttctttttcccttttttgctgtggtttgcattcacggcagtagttagcccaggtgtggggaacgagagtgcactgcatgatagcgttctggtgagctgggaaggacccaccactgccactgaggattgttttggaagaaaggaatatttttatcttggggaccagctaagtctctgcagtagtgtgaaattccaaatggttgttttatcattggtttggtttaccaaaaaaaaggcagggaaaaaaaaaaaaaacaaccgtatgagcgcattggcttgtctgccgcaggcacagaagggtagaaagccacagcagggggcagtccagcagactctgactcaactttctaggcacctagcagagaaagataagatcaaaaggtgtttggtttttcttttaatttttattgtagtttttttgggtgggtgggggaagtaaactagactgaagcgatggattttttttttcttttttttctttagtgtttttccctttgttcttgaacacttttgccctgcagcctcagttttgaattcttttagcaacttggattagaggggcccatatgtcagaagctcccagcacctcctacttgggagaaaagtgagccatctgctggtcaggaagtcctccagagaggcagcttttcccacaatggtggcaggaaactttggggaaagcaggaatggtgtccactgctgcggaggaactgccttcagagaaggtggggctggaaaagggttagaagcctcctagctgggattgtctttgtttcacctttctttaaattagaattacagaagcccctgcccagtgaacagataacaattggtcttatgctcctccctttcccccattttttcttttgctgttttgttttttgttttttgtttgtttgtttgtttttttgagacagagtcatgctctgtcacccgggctggagtgcagtggtgcgatctcagctcactgtaacctccgcctcccgggttcaagcaattatttgcctcagcctcccgagtagctgggattataggcacccgccaccatgtctggcttttagtagagacggggtttcaccatcttggccaggctggtcttggaactcctgacctcgtgagccaccacgcccagcctcttttgctgtttcattgctgacagtgttcaacaatatgccccatctttatatatcctaagaaacactaatcctaggttattgctagccaaaatatttttgtcctgagtagtgtcactgggccaaaagatagatcaggacgacagcctttagttttcctgaaatcaccaggtcaggcacaaggagaaaaggttcctggatactgactaacttgggtgggtctagccaggagaaagacagtaacatgtgttctgtactttctgggaagatccctgaagccatcacagaggctccccaacttctgagtcgcccatctgttgctgtgggagtgtgaacggatcgctgaaggagagggagctttgctctctctaggtgggcaagtttcctgggctctctgtgttgcctccctctggcttcttcctcccgtgccctctccccgtgtgccccagggggatcagggatcctcaccctcctgaggcccagtggggaagaatgaacatggcttcatccaggttaactgatgctgccatttgcccagcctcttccatcccagccctgtcagtgagcccaggtctggtgcaactgctgcaggatgcctgtagtagggaactctggaagtgtattgggctgaggtgggattttccctccccacagtgcactgagcaatggagggtggtgagggagccatgctgctgaattctggttggcatttccccattatgtaaaatggggtgttgggtagggcagactctgcttgggtttggttgtaagataaacctggaggagaagcacagttgtcccattgaattatttgagcaaaaactactgtaaataacttttttgtcttttgtcaaataaaatttttttttgtttttttaagcagaaaaaaaaaaaaaaaaaaaaaaaaaaaaaaaaaaaaaaa

SEQ ID NO: 198 - DNA, 3565 bp, Homo Sapiens
ccgccgctgtcactgttggtgcgggcgcgtcggggccgggccggggcactgtaaatggcggcggagggaggcggagcggcggccacgctcagcccagatcccccgaaactttaggttcgaagccccacaactttccgggaagcgctgccgctccggaggcgtggacggaaggggaagccgaggcgggaagtctgggggaatcggcagggagccggggagactcgaacccgcggcgggggcggagtccgccagtgcctcgcgcctccgcggcccccgcctctttctctgcaccctccccgcggccggagccggagccggagccggagccgtagtcgcagccgcagccgcagccgcgcgccgggcctcgcaggcagcggcgcggcgagcgcagccgggccccctcctcgcgacctccgggccctgttgctcgggcgcacctggcgcgtgtgaggccggggccggcgttttcgggaagctagcaggaggccgggccacgcgcagcccctgccggcccaggttcctggggccgggccccgagtagtgcatgcggggcggggcggccgtgagccggaggcgaagatggaaggcttaacgctgagcgatgcggagcagaaatactattcagatctcttctcctactgcgacattgagagcaccaagaaggtggtggtcaacgggcgggtgctggagctgttccgggccgcgcagctgccgaacgacgtggtcctacagatcatggagctttgtggtgcaacaagacttggttattttggaagaagtcagttctacattgctttgaaacttgtagctgttgcccagtctggtttccctttaagagtggaaagtataaatacagtaaaggaccttcctctgccaagatttgttgcttcaaagaatgaacaggaatctcgccatgcagcctcatattcttcagattctgaaaatcaagggtcgtattctggtgtaattcccccaccacctggcagggggcaagtgaaaaagggatccgtaagccatgatacggttcagcctcgtacatctgcagatgcacaggaacctgcatccccagtagtttcaccacagcaatccccaccaacttctccacacacatggaggaagcacagccgtcatcccagcggtgggaatagtgagaggcctctcgcgggacctgggccattttggtctccctttggtgaagcacaatcaggttcttctgctggtgatgcagtgtggtcagggcattccccacctccacctcaagaaaactgggtcagttttgcagatactccaccaaccagtactcttttaaccatgcatcctgcttctgtccaggaccagacaacagtacgaactgtagcatcagctacaactgccattgaaattcgtaggcaatccagtagttatgatgatccctggaaaataacagatgaacaaagacagtattatgtaaatcagtttaaaaccattcagcctgatctaaacggatttattccaggatctgcagctaaagagttttttacaaaatcaaaacttcctattcttgaactttctcatatttgggaactctcagactttgataaagatggtgcattgacactggatgagttttgtgctgcttttcatctggtggttgctaggaagaatggctatgatttaccagaaaaacttcctgaaagcttaatgcccaaactgattgatttggaagattcagcagatgttggggatcagccaggtgaggtaggttattcaggctctcctgctgaagctcctccaagcaagtcaccatcgatgccatcactaaaccagacatggcctgagctgaatcagagcagtgagcagtgggagacatttagtgaacgctcttcaagctcacaaactctgacccaatttgattctaacattgcaccagctgatcctgatactgctattgttcatccagttcccattcgtatgactccaagcaaaatccacatgcaggaaatggaacttaaaagaactggcagcgatcatacaaatcccactagcccattacttgtgaaaccatctgaccttttagaagaaaataagataaattcatcggtgaaattcgcttctggtaatactgtagatggttacagtagttcagactcttttacttctgacccagaacagatcgggagcaatgtaactcgtcaaaggtctcattcaggaacgtcgcctgataacactgcaccaccacctccccctccaaggccacagccctctcattctagatcatcatctttagatatgaatcggacctttacagtcaccacaggacaacaacaggctggagttgttgcccatcctcctgcagtgcctccaagaccacagccctcacaggctcctggtcctgctgtgcatcgcccagtggatgccgatggcctcataactcacactagtacctcacctcagcagataccagagcaaccaaattttgcagatttcagtcagtttgaagtatttgctgcatcaaatgtaaacgacgaacaagatgatgaagccgagaaacatccagaagtcctgccggctgaaaaagcttctgatcctgcaagttctcttcgagttgccaaaacagatagtaaaactgaagaaaagacagctgctagtgctcctgccaatgtgagcaaaggcacaacaccacttgctccaccacctaaacctgttcgaagaagattaaaatcagaagatgaattaaggccagaagttgatgaacatacacaaaagacgggtgtcttagctgctgttcttgcatcacaaccttctattcccagatctgttgggaaagataagaaagctattcaggcatcaattagacgtaataaggaaaccaacaccgttttggccagattgaatagcgaattgcagcaacaattaaaggatgttcttgaggagagaatttccctggaagttcaactggaacaacttcgaccattctctcacctataagccaattgccgttaactgtgaacatacttgtttttaagtggttttgggttcaaagccaatttggagacctagacattcagctcactgcttaactcaacattaaattttatgattctgttttgccctatatgttcaccgttgtatttaagtatcttttattttttaatttcgacaataaaaaggtcaggatggcgttttctggagggtagattgtgtttgttggcacacccaccttttctgttccctagcatctgggatatgcaatgcttctatggctaataccacacaccaatttaatttatagaatgggctcctcatttacatctcagtcacagactcagaaataaattgtcagtttgtccttttatgtttaatattttacataaagcatctattctataaaaatctttagaaagagtttcccatttaattttgattttaaagaattatattggataaggtggttttcaccataagctaatttactctctgcagccgtctacattcttcacaaatcatgtggtacattgaagcctcttttacatgtcaacttgtgacaaatacaaacatgtgagattttaaaaaaaaaaaaaaaaaa

SEQ ID NO: 199 - DNA, 2374 bp, Homo Sapiens
atgattgaaaggcctgaaacagatgtatcttccaagttcttatcaagaaaatgactgtgagggcaacgatgggtcaagaagaccagcggaaaactccctaggagagagccatagaaaatgtacacttcagaagagaaatgtaatcagagaactcaaaaaaggaaaatatataatgtatgccctcggaagggtaaaaagatttttattcatatgcatgagattattcagatagatggtcatatataccagtgccttgaatgcaagcaaaacttgtgtgaaaacttagctcttattatgtgtgagagaacccatactggggagaaaccttataaatgtgatatgtgtgagaaaacctttgtccaaagctcagatcttacttcacaccagaggatccacaattacgagaaaccttataaatgtagcaaatgtgagaagagcttttggcatcacttagtgctttcaggacatcagagaacacatgcaggtaaaaaattctatacatgtgacatttgtggcaagaattttggtcagagttctgatctgcttgtccaccagcgaagccatactggcgagaaaccatatctatgtagtgagtgtgacaaatgcttcagtagaagtacaaacctcataaggcatcgaagaactcacacaggtgagaaaccatttaagtgtctcgagtgtgaaaaagcttttagtgggaaatcagatcttattagccaccagagaactcacactggggaaaggccctacaaatgtaataagtgtgagaaaagttaccgacaccgttcagccttcattgtacataaaagagttcatactggggagaagccctataagtgtggtgcctgtgaaaaatgctttggccagaaatcagaccttatcgtgcaccagagagtccacacaggtgagaagccgtataaatgcctggaatgtatgagaagttttactcggagtgccaacctaattaggcaccaggcaactcacactcacacttttaaatgccttgaatatgaaaaaagctttaactgtagctcagatcttattgtacatcagagaattcacatggaagagaaaccacatcagtggtctgcgtgtgagagtggcttcctcctaggaatggactttgttgcccaacagaaaatgagaactcaaacagaggagctacactataaatacactgtatgtgataaaagcttccaccagagttcagcccttcttcaacatcagacagtacgcattggtgaaaaaccgtttgtctgtaatgtgagtgaaaaaggtcttgagcttagccctccccatgcgtcagaagcctcacagatgtcttgaccaggcgagaagctgtaataccaatattaaaaattatttatgtatcagagaactcattaagatgaggacaaatctcagactttgctcagagctcagaattcagtggggaccagagagcctgcaattggaaatatgagaaattctttgcccagagagctgccctaacagaacacttcatcctcactccaacgagaaatctacagatgcccagaggttttgaaaacttaccgtctgagctcaaatttgatcactcacaagaggattcatacaagtgggaaaccttagaaatgcactgagtgtgagagagctttctactaatgctcagcccttctcgttgtaagagaattcacaccggagaacaactttttaaatgccttcagtgtcagttgtgctgcagacagtatgaacatctcattggacctcagaaaacccaccctggggagaagccccagcaagtgtgaaaaaagcttctaacaaaactctgacttacccatcagagaagccatactggtgaaaaattgtatatttgtcttacgtatggcaaaagcattcattggagagccttacttgggtttgcacccaaaaaaaaaaacccaatctgaggaaagactgcaagtgtctgaatgaagagtgcttgtcaatgatcaactcttgtggtacatcagggaactcacataggtgaaaaaacccatacttaccttgagtctgagaaaacctttggtagaagctcctgtcttatcaggccccaaaaaacctgttctgcagtgagagatttaattgtgggtgagaatctatgtacatatgtatgagaagactgttctcatagttagttgactcatatggtagagaggactttacatgaaatcagtatgaaaatagttttttagatacccagaagcttgttctgggagaagctagggcgggtcagagtagacctgatgggtaactcaggtaaagatgcttttcttttatctgaactacttaatgattgctttacttttactttttaaaaaattcagaaatccaataaaggaaaggacggtaacct

SEQ ID NO: 200 - DNA, 2103 bp, Homo Sapiens
aagctgacacacagaccgacacaggcagcgagagacacgaggagcaaagcaagtgaaggcacagacgcacgggacaggagagcctgggcaagactggagagcccagacctgggatggcggattcgtgcaggaacctcacctacgtgcggggctcggtggggccggccaccagcaccctgatgttcgtggccggtgtggtgggcaacgggctggccctgggcatcctgagcgcacggcgaccggcgcgcccctcggccttcgcggtgctggtgaccggactggcggccaccgacctgctgggcaccagcttcctgagcccggccgtgttcgtggcctatgcgcgcaacagctccctgctgggcctggcccgaggcggccccgccctgtgcgatgccttcgccttcgccatgaccttcttcggcctggcgtccatgctcatcctctttgccatggccgtggagcgctgcctggcgctgagccacccctacctctacgcgcagctggacgggccccgctgcgcccgcctggcgctgccagccatctacgccttctgcgtcctcttctgcgcgctgcccctgctgggcctgggccaacaccagcagtactgccccggcagctggtgcttcctccgcatgcgctgggcccagccgggcggcgccgccttctcgctggcctacgccggcctggtggccctgctggtggctgccatcttcctctgcaacggctcggtcaccctcagcctctgccgcatgtaccgccagcagaagcgccaccagggctctctgggtccacggccgcgcaccggagaggacgaggtggaccacctgatcctgctggccctcatgacagtggtcatggccgtgtgctccctgcctctcacgatccgctgcttcacccaggctgtcgcccctgacagcagcagtgagatgggggacctccttgccttccgcttctacgccttcaaccccatcctggacccctgggtcttcatccttttccgcaaggctgtcttccagcgactcaagctctgggtctgctgcctgtgcctcgggcctgcccacggagactcgcagacacccctttcccagctcgcctcagggaggagggacccaagggccccctctgctcctgtgggaaaggaggggagctgcgtgcctttgtcggcttggggcgaggggcaggtggagcccttgcctcccacacagcagtccagcggcagcgccgtgggaacgtcgtccaaagcagaagccagcgtcgcctgctccctctgctgacatttcaagctgaccctgtgatctctgccctgtcttcgggcgacaggagccagaaaatcagggacatggctgatggctgcggatgctggaaccttggcccccaaactctggggccgatcagctgctgtttctcctgcggcagggcagtcgctgctggctctgggaagagagtgagggacagaggaaacgtttatcctggagtgcagaaagaatggttctctcaaaataaccagtggcctggccgacctgctctggccctggattccccatccatctcattgtctaaatatttagaaggcggagaagttcccagaggcttctgtacagtcaggtctgctctggtctgggtgctggctccaatctgcgtccacttaggaggcccaactgcccaccccaagtccccaggggatggccctccccctctaccaagccactccaagagccagcccctttctgctccacaaaaaccacagttattggaaaagctccctgccttcccttgccgctggtcccccaccaggcttgggagccctggcatcccaaaggggcaacgggaggaaggggaggctgctgcattgtgggtgatgacgtaggacatgtgcttggtacaaaaagggcctgagacattccacctagcttgactggctgcaagatgagaactgggggggtgcaggtggtggggagacagatggagaagctggcagatgaagggtgggggctgcggatcccagggactgccccagaacacaaacctaagtcctgtgcctgtccccagggtcctgaataaataaaagcctccttgcagagcctgaaaaaaaaaaaaaaaaaa

SEQ ID NO: 201 - DNA, 2416 bp, Homo Sapiens
ggagtgattgcccggcagagcgcgatactcgtttgtagtttcataaacattgatgttgggtcaatcatgttctcaatgtatttaaccatgtgtttttaaattttttaatttagttatcaaattgagaatctgatggtatggcattaatcaccttgaggaagaacctttatcgtttatctgattttcagatgcatagagctctggctgctttaaaaaataaacctctaaatcatgttcacaaggtagtcaaggagcgtctgtgcccttggttgtgttcacgacaacctgagcctttcggggtcaaattccatcatgcccattgtaaaaagtttcattcgaaaaatggaaatgaccttcatccactcggtggaccagtgttctctcaagtatctgactgcgacaggcttgaacaaaatgttaaaaatgaggagagtcagatgttttacaggagactgagcaacttgacttcatcagaagaagtgctaagttttataagcacgatggaaaccctgcctgacactatggcagcaggagctttacaacgaatttgtgaagtggaaaaaaaggatggtgatcaagggctgccaaaagaaatactggagaatagcatctttcaagctttatgctttcagtttgaaaaggagccctcacagctgtcaaacactagtttagtgactgctttgcaagctctgattctgttgcatgtggatcctcaaagtagcctgttgctgaacctggtggcagaatgccaaaatcgtctcagaaaaggtggcatggaagttcgcaatctttgtattcttggggaaagtctgattacactgcacagttcaggttgtgtgacactagaactcattataaatcaacttcaaggtgaaaaattggaaacatttaccccggaggatattgtggccctttatagaatcttgcaggcatgtactgaaaaagtggatgaacaccaaacatttttaaataagataaacaacttttccctatcaatagtttccaacctgagtcctaaattgattagccaaatgctcactgccctggtggttcttgatcaaagtcaagcatttcctctgattataaaattgggcaaatatgtcgtgaggcatgtcccacatttcactaacgaggagcttaggagagtcttggaggcgttcatatattttgggcaccatgacacattttttacaaaagccctagagcatcgtgtagctgcggtgtgcctcacgttggatcctgaagttgtctgcagggtcatggagtactgcagtagagaactgattctttcaaaacccatcctcaatgcagtggcagaaacttttgtttgccaaacagaaaaattttcacctcgtcagatttctgcgttaatggaaccatttgggaaactcaattatttgccaccaaatgcctctgctttatttagaaagctggaaaacgtgctattcactcatttcaattattttccacccaaatcattattgaaacttcttcattcatgttcacttaatgaatgccatccagtcaactttctggcaaaaatattcaagcctcttttccttcaacggctgcaaggtaaagaatctcatttggacacattgagtcgggcacaactgacccaacttttcttagcctcagtcctggaatgccctttctataagggtccaaaactccttcctaaatatcaagtgaagtcatttcttaccccatgctgttccctggagacccctgtggattctcagctttatagatatgtgaagattgggctgactaaccttttaggagcaagattatattttgctccaaaagtgttgacaccctattgttatacaatagatgttgaaattaaattagatgaagaaggatttgtattgccatccacagctaatgaagatatccataaaaggatagcactgtgtattgatggtccaaaaaggttttgctccaatagcaaacacttactggggaaagaagctattaaacaaagacacctacagttactcggttatcaagttgttcagatcccctatcatgagattgggatgctaaaatcaagacgtgaattggtggaatatttacaaagaaaactgttttctcaaaacactgttcattggttgcaagaatgaatactgacttcagaactcaaacaatggaagaacttgcatttttatggaactcagtattaaaagaaaaatataatgtgaattagccactttgcagaatatgttctagactggtgatctgaaagcatctgtagttttccttatactatgtatacatttattgtggtaaaatttaaaattaattttaatttaatactagtgtcatagatactttttgtacatcaaacaattgatcatgtgctgtaaaggaattcaatgaataaatgttatttttaagtaaaaaaaaaaaaaaa

SEQ ID NO: 202 - DNA, 7184 bp, Homo Sapiens
cggcgcggcgggagcagagatctgcggccgtttgcagcttgcggtagggaggcgtggtggtctgaagcctccgagcagccgcggccatggcggatgtaaccgcccgtagtctgcaatacgagtacaaggcgaactcgaatcttgtgctccaagctgaccgttctctcattgaccggacccgccgggatgaacccacaggagaggtgctgtcccttgttgggaagctggagggcacccgtatgggagacaaggctcaacggaccaaaccgcagatgcaggaggaaagaagagccaagcgaagaaagcgtgatgaggaccggcatgacatcaacaagatgaagggttatactctgctgtcggagggcattgatgagatggtgggcatcatctacaagcccaaaactaaagagactcgggagacctatgaggtgctactcagcttcatccaggctgctcttggggaccagccacgtgatatcctttgtggggcagctgatgaagttctagctgttctaaagaatgaaaagctgcgggacaaggaaaggcgaaaggagattgacctgctgctgggtcaaacagatgataccagataccatgtgctagtgaacctgggcaaaaagatcacagactatggtggagataaggaaatccaaaatatggatgacaacattgatgagacatacggtgtgaatgtgcagtttgagtctgatgaggaggaaggtgatgaagacgtatacggggaggttcgagaagaggcatctgatgatgacatggaaggggacgaggctgtcgtgcgctgcaccctctcggctaatctcgtagcctcaggtgaactgatgagttccaagaagaaggatttgcaccctcgggatattgatgcattttggctgcagcggcagctcagtcgtttctatgatgatgccatcgtgtcgcagaagaaggcagatgaagtattggagattttgaagacggccagtgatgatcgggaatgtgaaaatcagctggttctgctgcttggtttcaacacctttgatttcattaaagtgttgcggcagcacaggatgatgattttatactgtaccttgctggccagtgcacaaagtgaagctgaaaaggaaaggattatgggaaagatggaagctgacccagagctatccaagttcctctaccagcttcatgaaaccgagaaggaggatctgatccgagaggaaaggtcccggagagagcgagtgcgtcagtctcgaatggacacagatctggaaaccatggatctcgaccagggtggagaggcactggctccacggcaggttctggacttggaggacctggtttttacccaagggagccactttatggccaataaacgctgtcagcttcctgatggatccttccgtcgccagcgtaagggctatgaagaggtgcatgtgcctgctctgaagcccaagccctttggctcagaagaacaactgcttccagtggaaaagctgccaaagtatgcccaggctgggtttgagggcttcaaaacactgaatcggatccagagtaagctctaccgtgctgcccttgagacggatgagaatctgctgctgtgtgctcctactggtgctgggaagaccaacgtggccctgatgtgcatgctccgagagattgggaaacacataaacatggacggcaccatcaatgtggatgacttcaagattatctacattgcccccatgcgctccttggtgcaggagatggtgggcagctttggaaagcgcctggccacttatggcatcactgttgctgaactgactggggaccaccagctgtgcaaagaagagatcagtgccactcagatcatcgtctgcacccccgagaagtgggacatcatcacccgcaagggtggtgagcgcacctacacccagctggtgcggctcatcattctggatgagattcatcttctccacgatgacagaggtcctgtcttagaagctttagtggccagggccatccgaaacattgagatgacccaagaggatgtccgactcattggtctcagtgccaccctacccaactatgaagatgtagccacctttctacgtgttgaccctgccaagggtctcttttactttgacaacagcttccgtccagtgcctctggaacagacatatgtgggtatcacagagaaaaaagctatcaagcgtttccagatcatgaatgaaatcgtctatgaaaaaatcatggaacatgctggaaaaaatcaggtgctggtgtttgtccactcccggaaggagactggaaagacagccagggccatccgggacatgtgcctagaaaaggacactctgggtctgtttctgagggagggctcagcctccacagaagtcctgcgaacagaagctgagcagtgcaagaacctagagctgaaggatcttctgccttatggctttgctattcatcacgcaggcatgaccagggttgaccgaacactcgtggaggatctttttgctgataaacatattcaggttttagtttccacagcaactctagcttggggtgtgaatctccctgcacatacagtcatcatcaaaggcacccaggtgtacagtccagagaaggggcgttggacagaactgggagcactggacattctgcagatgctgggacgtgccggaagaccccagtatgacaccaagggtgaaggcatactcatcacatctcatggggagctacagtactacctgtccctcctcaatcaacaacttcctattgaaagccagatggtttcaaagcttcctgacatgctcaatgcagaaatcgtgctaggaaatgtccagaatgccaaggatgcggtgaactggctgggctatgcctacctctatatccgaatgctgcgatccccaaccctctatggcatctctcatgatgacctcaagggagatcccctgctggaccagcgccgactagatctggttcatacagctgccctgatgctggacaagaacaatctggtcaagtacgacaagaagacgggcaacttccaggtgacagaactgggccgtatagccagccactactacatcaccaatgatacagtgcagacttacaaccagctgctgaagcccaccctgagtgagattgagcttttcagggtcttctcattgtcctctgagttcaagaacatcacagtgagagaggaggagaagctggagctgcagaagttgctggagagggtgcctatccctgtaaaggagagcattgaggaacccagtgctaagatcaacgttcttctgcaagccttcatctcacagctgaaattggagggctttgcactgatggctgacatggtgtatgtcacacagtcggctggccggttgatgcgagcgatatttgaaattgtcctgaaccgaggttgggcacagcttacagacaagaccctgaacctctgcaagatgatcgacaaacgcatgtggcagtccatgtgtcctctgcgccagttccggaaactccctgaggaagtagtgaagaagattgagaagaagaatttcccctttgagcgtctgtacgacctgaatcataatgagattggggagcttatccgcatgccaaagatggggaagaccatccacaaatatgtccatctgtttcccaagttggagttgtcagtgcacctgcagcctatcacacgctccaccctgaaggtggagctgaccatcacgccagacttccagtgggatgaaaaggtgcatggttcatccgaggctttttggattctggtggaggatgtggacagcgaggtgattctgcaccatgagtattttctcctcaaggccaagtacgcccaggacgagcacctcattacattcttcgtgcctgtctttgaaccgctgccccctcagtacttcatccgagtggtgtctgaccgctggctctcttgtgagacccagctgcctgtctccttccggcacctgatcttgccggagaagtacccccctccaaccgaacttttggacctgcagcccttgcccgtgtctgctctgagaaacagtgcctttgagagtctttaccaagataaatttcctttcttcaatcccatccagacccaggtgtttaacactgtatacaacagtgacgacaacgtgtttgtgggggcccccacgggcagcgggaagactatttgtgcagagtttgccatcctgcgaatgctgctgcagagctcggaggggcgctgtgtgtacatcacccccatggaggccctggcagagcaggtatacatggactggtacgagaagttccaggacaggctcaacaagaaggtggtactcctgacaggcgagaccagcacagacctgaagctgctgggcaaagggaacattatcatcagcacccctgagaagtgggacatactttcccggcgatggaagcagcgcaagaacgtgcagaacatcaacctcttcgtggtggatgaggtccaccttatcgggggcgagaatgggcctgtcttagaagtgatctgctcccgaatgcgctacatctcctcccagattgagcggcccattcgcattgtggcactcagctcttcgctctccaatgccaaggatgtggcccactggctgggctgcagtgccacctccaccttcaacttccatcccaatgtgcgtcccgtccccttggagctgcacatccagggcttcaacatcagccatacacaaacccgcctgctctccatggccaagcctgtgtaccatgctatcaccaagcactcgcccaagaagcctgtcattgtctttgtgccgtctcgcaagcagacccgcctcactgccattgacatcctcaccacctgtgcagcagacatccaacggcagaggttcttgcactgcaccgagaaggatctgattccgtacctggagaagctaagtgacagcacgctcaaggaaacgctgctaaatggggtgggctacctgcatgaggggctcagccccatggagcgacgcctggtggagcagctcttcagctcaggggctatccaggtggtggtggcttctcggagtctctgctggggcatgaacgtggctgcccacctggtaatcatcatggatacccagtactacaatggcaagatccacgcctatgtggattaccccatctatgacgtgcttcagatggtgggccacgccaaccgccctttgcaggacgatgaggggcgctgtgtcatcatgtgtcagggctccaagaaggatttcttcaagaagttcttatatgagccattgccagtagaatctcacctggaccactgtatgcatgaccacttcaatgctgagatcgtcaccaagaccattgagaacaagcaggatgctgtggactacctcacctggacctttctgtaccgccgcatgacacagaaccccaattactacaacctgcagggcatctcccatcgtcacttgtcggaccacttgtcagagctggtggagcagaccctgagtgacctggagcagtccaagtgcatcagcatcgaggacgagatggacgtggcgcctctgaacctaggcatgatcgccgcctactattacatcaactacaccaccattgagctcttcagcatgtccctcaatgccaagaccaaggtgcgagggcttatcgagatcatctccaatgcagcagagtatgagaacattcccatccggcaccatgaagacaatctcctgaggcagttggctcagaaggtcccccacaagctgaataaccctaagttcaatgatccgcacgtcaagaccaacctgctcctgcaggctcacttgtctcgcatgcagctgagtgctgagttgcagtcagatacggaggaaatccttagtaaggcaatccggctcatccaggcctgcgtggatgtcctttccagcaatgggtggctcagccctgctctggcagctatggaactggcccagatggtcacccaagccatgtggtccaaggactcatacctgaagcagctgccacacttcacctctgagcatatcaaacgttgcacagacaagggagtggagagtgttttcgacatcatggagatggaggatgaagaacggaacgcgttgcttcagctgactgacagccagattgcagatgtggctcgcttttgtaaccgctaccctaatatcgaactatcttatgaggtggtagataaggacagcatccgcagtggcgggccagttgtggtgctggtgcagctggagcgagaggaggaagtcacaggccctgtcattgcgcctctcttcccgcagaaacgtgaagagggctggtgggtggtgattggagatgccaagtccaatagcctcatctccatcaagaggctgaccttgcagcagaaggccaaggtgaagttggactttgtggccccagccactggtgcccacaactacactctgtacttcatgagtgacgcttacatgggatgtgaccaggagtacaaattcagcgtggatgtgaaagaagctgagacagacagtgattcagattgagtcctgaggcatttacttttgggtaaaggagagttgagcctgaattaggaatgtgtacattgtaggaatcctggttgtggggaccaggtctgtgggcctcaggtctggccagccagggctggtgctgtccccgcctacctccacttcctttcccttgctcactctggatccagtgacagcaggtgtcatgggtcaagcataaatcatatatagcattttcaggcatgttcctggtagttcttttgagtctgacattctaataaaataatttgtagaaaccatttgtctttgtagtgattccaaattaaaagttttctttctccaacctgagggcacggccaaaaagatctggttattttttagccaggaacgtgcttgttaatgagtatgtctggaggacagacctgctcattaggtgtgctgtcccctgtagcctcgtgagtcagcccagaggagggtacatgcgactgtggcctggcctcagtggtacccacacatcagcactaccacaagaaccaacactgagcctcggaagctagatcacaggttaggggtttctctagatgggggttctgaaatttgcagtgtctgctcctgggaggcagcaccagaaagggcactgaaatgtactagctggatgtgacccagtcttaataaacaggttttctaatccagaaaaaaaaaaaa

SEQ ID NO: 203 - DNA, 853 bp, Homo Sapiens
ctagtcctgacttcacttctgatgaggaagcctctctccttagccttcagcctttcctcccaccctgccataagtaatttgatcctcaagaagttaaaccacacctcattggtccctggctaattcaccaatttacaaacagcaggaaatagaaacttaagagaaatacacacttctgagaaactgaaacgacaggggaaaggaggtctcactgagcaccgtcccagcatccggacaccacagcggcccttcgctccacgcagaaaaccacacttctcaaaccttcactcaacacttccttccccaaagccagaagatgcacaaggaggaacatgaggtggctgtgctgggggcaccccccagcaccatccttccaaggtccaccgtgatcaacatccacagcgagacctccgtgcccgaccatgtcgtctggtccctgttcaacaccctcttcttgaactggtgctgtctgggcttcatagcattcgcctactccgtgaagtctagggacaggaagatggttggcgacgtgaccggggcccaggcctatgcctccaccgccaagtgcctgaacatctgggccctgattctgggcatcctcatgaccattggattcatcctgtcactggtattcggctctgtgacagtctaccatattatgttacagataatacaggaaaaacggggttactagtagccgcccatagcctgcaacctttgcactccactgtgcaatgctggccctgcacgctggggctgttgcccctgcccccttggtcctgcccctagatacagcagtttatacccacacacctgtctacagtgtcattcaataaagtgcacgtgcttgtga

SEQ ID NO: 204 - DNA, 3250 bp, Homo Sapiens
cggcctcaccttttcctgcccgaagcagaagattctcgcagtcctggtttctccctccagaagaccccccacccaaatcctctgtagctcctggtagtgccctgacccctgctgccaccgtccttcagagagcaacggaagagcttcccggagggcgaggaaaagagggaaagtagccagcaatgtcgaacgcaatgtataataagatgtggcatcagacccaagaagccctcggtgctttactcgataaagagcctcagaagatgattgaaccacaaagaaatcaggttttcatctttcaaacattagccaccttctacgtaaagtatgtgcagatctttagaaacctagagaatgtctacgaccagttcgtccacccccagaaacgaatactgatcaggaaagtcctggacggggtgatgggccgcatcctggagctgaagaacgagatggtggagctggaactcacggagttccattatttcgatgatatcctgcaggatctcaagctggccccccaacaattagatattcccatacccaagtattttttgaaggagaagttggaagtaataaaaggaagagagaaaattcttgctcaaatattagcggacagcggaatagatacatctgacatgaaataccctgtaaagagtatccctttcgatgaggctgttaaattaatccagattgctgagagggcacggcaaggtcgcctaagggctttattcatgaagcaaatctatctgcaagaatatagagcaaagcaatccaagatgcttggcaagaaagtgacagatacctgggctgctgcactccgcattcagaaggtttggcgacgtttccatcaacgtaaggaaactgaaaaactgagagaagaggagatgatcttcctgggtatgaatccacctcctctctttaatgaagtcagtgctacagtaatccaggctgaaaaggtggaccgcctgcggaatgaggtgcagataaagcatgaagaggactacagggaagccctggttaccatcaagaatgacctaaagttgatagaaggcgtggatatcaaggagaaccttcaagaccagatccggcattggttcatcgaatgcagaaatttaaccgggacatttcctgactaccctgacgttgaagaaggagggtcagctattattttttctgacaagaccatacaacaggttattgaggatatcatagcaaaccaagaggaagaagaaaaaaacaaaaagaagaagaagaaaaaggaaaaacaacccaagaaagccaaaaaacaaaagaaaggaacaaaggagaaaaataaggaagaagacgaaaaatggaaaatgtcaccaagtctttttcttcctgcaatgaaggaaggatgtaacgcatacaaagaaatctggatgaaaaaagatgagtcttggaatttctctcaggactatgatccagaactgatcaaagaggagaaacgaaaagaattacagtcagagatcaggatacaggttgatgagttgatgagacaggaacttaaaaacttaaagctagctgtggacagagaaagggagcgcccagtgaaagcaggaaagaaaaaggacaagaaaggaaagaaaggcaaaaagaaagagaagaaggcaaagaaggataaagatctgacagctgacaggaccatcgagtctctgtataaggaactggtggaagaaggattactgatccaggctctgaaagtcaacctctctgattacattggtgagtacagctacctggggactactcttcgccaggtgtccatagaacccatgccctccctcctggatgtcagacagctcatcacattgtacggaatctggccattaggttctgcagcagtgcatgagaaagctcctttggtgaaatcgctactgttagccgggccgtctggggtagggaagaaaatgctggtccatgccatctgcaccgaaacgggagccaacctcttcaacttgtcctcctctaacattgctgggaaataccctggcaaaaatggcctccaaatgatgctgcatgcagtcttcaaggtggctcgacagctccagccctccgtggtgtggattgaagacacagaaaaaaccttctacaaaaaagttcccaacgcagaaaagatgaatgaacctaaacgcctgaaaaaacaccttccccaaatcctgaaactcctgaaaccagatgaccggattctgattgtggggaccacacggcgtcccttcgatgctgaactccaatctttctgcaaagtttaccagaaaattattttggtgcccagaccagactatgcttccagatacgttctgtggaagcaaatcattgaacgcaatggaggagtcctcaccagtgccttgaatgtcagctgcctggcgaaggtcactgacggcttcacccaaggacatatagtcgaagtggttaaaggcgtgctcacagatcagagaatccggcggcaaattcataaacctctcactgcagttgagtttattacggcgataaccagcatgaatccagtgtacaaagaggaagaagagagctttaagaactggtatgccaaaactcctctgggtaaaaaacgtgccttggcgataacaggaggcagcacagaaaaggcaaaggacaaagggaaaaggaaataaaagaaagagaaaaaggcaaaaaagaaaaagtaatgcctttctgaagaaccatgcttgagtctctctgggatggagaggaccccaactcgccaaagaaaagattcaccattgcccgcctgaagaagccctcaggggaaggaacttagcagtgtgcaggtgagctgatgccgcaaacccgctaaccactgcatgtgctgttatgcctttcccaggctggacacctagctgggtgttcatcataactttccacagctttaatccacgccaagtttgtatataactgaaattcactcttgacaccctccacagtctttccaagttggactcttcctctcatcagtactagttgtcaaatttaaaatgtgacagttaaagaatattctagtttgacaattagtaagcaatgagtatatcatcagtacactagctttttattaatccatgtacactgtatagtatcttgcatctattttaataaattaattctttgctctagtaatagattttatataatgaaataaaggtgttgtccttgaaaaaaaaaaaaaaaaaaaaaaaaaaaaaaaaaaaaaaaaaaaaaaaaaaaaaaaaaaaaaaaa

SEQ ID NO: 205 - DNA, 2580 bp, Homo Sapiens
ggtgcggggaggtcgcccccgggcggcgaagcggccattatgcaggccttgcattgaaaggctctagttacagtggacttcttgaacgacatcatattcacaccaaaaatgtagaacatattatagatagtttacggaatgagggaattgaggttcgtctagtaaagaggagagaatatgatgaagagactgttcgatgggcagatgctgtcatagctgcaggaggtgatggcacaatgctgctggcagcgagtaaagtcttggacagacttaaaccagttataggggtaaacactgatccagaacggtctgagggtcatttatgcctgcccgttcgatatacacattcctttccagaagccttacagaagttctatcgtggtgagttcaggtggttgtggaggcagagaatcaggttataccttgaagggactggcataaaccctgtacctgtggaccttcacgagcagcagctaagcttgaatcagcacaatagagcccttaacattgaaagagctcatgatgaaaggtctgaggcttcaggaccccaacttctgccagtgagagcactaaatgaagtcttcattggggagagtctgtcatccagggcttcctactatgagatttcagttgatgatggtccatgggaaaaacagaagagttcagggctcaatttgtgtactggaacaggatcaaaggcctggtcattcaatattaacagggttgcaactcaggctgtagaagatgttttaaatattgcaaaacgacaaggaaatttgagtcttccattgaacagagaattggtagagaaagtaacaaatgaatataatgaatcactgctctacagtccggaagaaccaaaaatacttttcagtattcgagaaccaatagcaaatagagttttctcaagcagtcgtcagcgttgtttctcctcaaaggtttgtgttcgttctcgttgttgggatgcctgtatggttgtggatggaggaacttcttttgagtttaatgatggtgcaattgcttcgatgatgatcaataaagaagatgagcttcgaactgtgcttcttgaacagtgaaggatttcctcatgacaaattttgattactggcgagaatatttttacttcagaaacagactaccagtcgtaaagtgacattttttggttattgttgagactgcttgcccgtgggctcagaagtgagatttgcattattcttctgttggattctgatagaaaaaaagacattcactgtataagaaaatggatggactgaaccaattagaattgataccagtgaaatttttatattgcttacaattggtaaccaagagtgctgatacctttttaaatttagaggggcaggcttaaataaaggactaaatatttaggatttgaaacttaactgtataagtgtgttttccttccctttcctcctaattgtgggattgtcagaactgaacacatatcatttgattagtgcatattttttatagtacctgaaaaccaagattttgaaaaaattttcaagacagagaattttgataaatcctgacattgacctaattgacataggtaaatatgtttgtatatgtgctaataattttctaatttcggaacacgatgatgttatgactattgatttaaaaatttcaaataataatttttgaaattatagatgaatgctttcatttgagtttcattctgtaattcagcagttctgggtgaaatacagatagcaaaacaaatcatgatgctgttacaaatgtattagttatccaataagtgttttaagtcaatttttttaaaatgatatgagtcttacaggtttcttccatctttaaaatgctcaaacatggattcagggactaaaaggatgaactgattagacattttctattaggagtttggtaaaatattgtaaaaatatcttcacctgtgttaggagtattatcagaaagaatggattctttaataaatatgtaaaacacagtagttttggaattgccttccttagtattgtggttttcacctagcttatattccaagatttacagaatagcttttaggataagatgttaggactttttttttttccccatgagaattcctttatttttggaggaaattattatctaattattgatctacttataagtaatcctagaatttttgccaaaagatcctgtcgttgcataatcaaacagttggtattctcgtgccgttgttcaaagtcatgtgtttctttcatttggtgctgaaaatttctgttcaatcattgacaaatatttattgaacacccactctgtgccatgtaaaactatgtcaggtgctggatatgttgatgaatgaaacagactctatccttatacaatttgagtcttgtgggctcagaagtaaattctgtgaaagctggacggatagtcgaattgagtgctcttagttttgccaatatttaacatgttgttcttatcaattttttaaaataaatgttaatgtacaaagttaaaaaaaaaaaaaaaaaaaaaaaaaaaaaaaaaaaaaaaaaaaaaaaaaaaaaaaaaaaaaaaaaaaaaaaaaaa

SEQ ID NO: 206 - DNA, 4204 bp, Homo Sapiens
agaggaagaggccggctcatgaggtcatcactagcaaaaatgtctgtgttctgtgatgtcatcacagggacaaagcctcgttcccatgaggtcatcacagaggaagaggccggcccgtgaggtcagcgctggaggccatgtccatgttctatggtgtcctcagaggcttccttcttgtggtataataacagagacgacgccttgttccatgacattccttcctgtggtgtcactgcagagacaatctcacctggatgatgtcatctctaactccaaggcctcttttggcatcatcgccatggggaagatattttctccctgtgtctttgcagcagagaagatgcctctgtcctatgatgtcatcattacagacaaagccatcttcctgggacacgtcgcaggggaaaatgcctcaccgattgtgtcctcactagacataaggtccccttttcacaacatcatcacagggaccctgcctccttcctgtgatgccatcaccagagaaggtgccttgccctatgacgtcatcagagggaccgtgcctcttcctgtgatgtcatcaccagagatgaccacccactctgggacctctccaggaggaggtcccttctgtgatgtcgcccagatgctatgtgctctgagatggcacaaagagatgcctccactgctgccaccatgttgtagaaggcagggcaggcccagagtccaggaccaccccagggaagatgccagagagcagagaggggccctgtcctgagatgttgtctgaaggaagcatcgctggggagccgcccatgtggagggcctcctccagagatgatggtctgtgtaggctgttggcagtgacacccctacccccaatgctgtgatggcatcaccagagcttcctcctcagaggcactgcccactctggaaggccatcggtattggtggtgtcaccagagttactgccttgtcccaccatgacttagcttggttgctccctccccagactccagggacatgtccagcaggatctctgccagaccctctgaggggaaatggggccttggatcccacatctgtgccatgactcctgggagacaggacctccagatggccttctgctcccaggaggccactctggatcaccaggatcctggagttctggcactcataggtgtcccatagcctggcctcacttttctttctgccatatctagagacaatcacctctgtcaacaaagtcctagccttctactggggggaggtgcttggggtacacctactcttgccctcactgacactgtcagcatcacacaacacccgccactcatgatggcaccacacccggggtcaagtgttacccatgtctgaggatggaatccttccccaggattacctatgacccacaactatggtatcatcttcttccaggatttaccatgactaatggtgtcaccatctgccaagactccccatagccaatggtgtcaccatcctccatgattcctcacaaccatggtgtcatcatctttcaggagccaccacagctgacggtgtcatcatctcctagattccaccatgaccagtgatgacattaccttccagaatccactacacctgacagagacatcctctactgaaatccactaggactgatgattccaccatttcccataatccctcatgattttggtgtcatcacctcccaagacccatgatgcccaatagtgtcatcatcatttgcagggatgcatggtgtcatcatctccagggatccacttcaaccatgtgccaccacctcccaggatttcattcaaacatgtgccactacctcccagtatccacttcaactatggtgttatcacctgccaggatccacgagagccaatgctgtcaccatccactaggatccaccataaccctggtgtcatcatctcctgtgatccatgaggtccagtgctgtcaccatccactaggatccaccatgaccctggtgtcatcatctcctgtgatccatgaggtccagtgctgtcaccatccactaggatccaccataaccctggtgtcatcatctcccaggatccatgaggtccagtgctgtctgtcaccatccactagtatccaccataaccctggtgtcatcttctcccaggatccatgaggtccagtgctgtcaccatccactaggatccgccataaccctggtgtcatcatccgtgatccatgaggtccagtgctgtcaccatccactaggatccaccataaccctggtgtcatcatctcccaggatccatgaggtccagtgttgtcaccatctactaggatccaccatgaccctggtgttatcatctcccaggatccatgaggtccagtgttgtcaccatctattaggatccaccatgaccctggtgttatcatctcccaggatccatgaggtccagtgctgtcaccacccactaggatccaccataaccctggtgtcatcccagagtccactgtaaccatgtgccatcatcccccaagagccatcatcttaggagccaagtaccgtgacgggctgtatttcagttgtcctctggggccgcatggtacttacagttgttcacttaaggggaaccagcacaacaggccatattcccgtttccactaaaaggacaggggtggggccagctgtccccctctgaagacttcacccctactctggccctccttatgtcactgcctcactcctgaccgaggatgatgcctgcatcaatcccaccacagatgtggcctcagccaacctcaccttaccccccggtgaggcacccaggccccccctgacagcagcgctgtccctcacccagccatctgattggtgacagggtcaacccagcaacctctcattatcaccagagaggaagcatttcaaccctcaggtgacgccactgccccctgcccaatccctgtcacttgggcccctaccaggatcagcactccactggccccggccaaattctcctcagagatccctgacccccgcgggatgggtcaaagctggtgaccgactggggccttcagtgctgtcttctgctggcctcatcctgcagcagggacactggagagcaatggtccctgccagcacatctgcggggaccaggggtgctccttcacctccctccctaacaccttaacacccggggagcctccgggggtggcaggaagtccccagcacccaatgcacaatcttccctcaattctctttgtacatagccatgttgcgggggcggccattcccccactcttaaagggctacacgcccctcccccagcccctagggcgaggtggggggggcctcttcttcctcccctgggccgtccccctccctcttatgtctccccgcaaacactggcacctcacactccttcttgtcaggagcttggggcagacaactggcccttggttcccaccacactgaggaaatgggggttacccaaatccacctgggccctggtgccagtttttcaaccccacggcttctagctgctctgaggggctcctcccatcccttccagggcctccccagccccgcactgctcaggccaactgtgacttccccagaaaggagccagcttgagcacccaccccctcccagccccctcccctctgctcaacacctccgcggaacactcagctttctccagctgccgggatttgggggtctgggcctttcagcttttttatcccccctccactagctctagcccagcctggattccagggatcccacccctagccctgtccctattcagttggcacaggctgcctgaccctggggccttgatttgatctcaaataagccatagaggagagaggtcttgaggggtgggagcaggtgtgtactgacaattcccctccacatgtcttgagctgggacctcgtcatctgagacttccccatgccccaacaaatgcaaatgcacacaaacccatgcatacacaagcacacacacacaggcatctccccgtctggttgggggagcatgggagggggcacttcacagggagaagataaatagttccacacctgaagaccctccaacagcttctgcctccctcctcatcacttcctctctccaccccctctccaacactggccccttcccctaattaattccctggtgaggacagccagaggagctgcgacttggtattttttggaataaatagacattttcctg

SEQ ID NO: 207 - DNA, 7932 bp, Homo Sapiens
gaagcttgaagacattatgctaagtgaaataagccagtcacaaaagaacaaatattgtattatttcagttatataaagtttctagactagtcaaattcatagaaactaggatgatagttgctagggtcagggagaagaggggatggaaaggtattgtttaatggatgcagagtttcagtttgagaagatgaataaaagaaaaaaatgacattaaattttgtcaagatagcatattgaaaatataatagaaaaatatttgtttatctgctataatatattatgtcataggtgttatcttcaggaaggcacactggacctgctaaattaacaaatggaaagaaagcgtaagtacttgaagacgtttacaacttcagatttcaaggaatttttcaggtctttgggctggatgacatgtcgtctaccccagaaaattaggtaggcctctaccatcacaagctctgaggaacaatttttcatgtctacccatgttaatcattttagtatttaacagtctttctgatcttcagaatgtgtttataaattcatcttgtacatggttggacaagctttcttgtctttgctggaaagaaaatgactacttactaatatattttgggaaaaatatttgtaagaatattaataagcttgttttccaggacctatttaagaaaaataccacgttttaatgcagattctggctattccatccattctgattcagaaagtcaggtaagattgaatagatacaatacacactattttaattagttttcaaatagtagctaaaaagtaggaataaaatgcaaagtattaattgctctaaggaagtatgaagtctgttgctttaaaacatcttttctaccaataatagtttgtaaataaacaaattttaaaactacataatttatattttttcctacactaacagtcatatacaaatgtattctaaatgactttatttcttacaggctgaaactgtacacgggcttgatggttgtgcttctttgctgagggacattttgagaaatgaagattcaggtttttttttttttaattctttgctgatcaccttatctcaagtcattattttgatgtaacaaatttttgttttattaataggttcagaaacagcatatttagaaaacagatctaattctagacctttagaaagcaaaagatacggatcaaaaaagaaaagacatgaaaaacatactattcctttggtagtccagaaagaaacatgtaagccttttttctcttagttatttaaagatgatccttaattgtgggtattttgatcaattatcaggattatacagttgattttcattttaataatcagtattagttaggtttatgtgtgcttatgcctttctgtattcagcttctaatcactgagtagtccactttgcttgctatcattttctcaagaagaaaaatagaaaaagagactgtcagggttttgtaggagaaaaagttcaaactcagaatgacatttgggaggtatatagagtgatcttagtttcccctgccacttgttttcatagataatcataaattggttgtatttcaagtgtatacttctagtagttgccttaaaattattatatttatatatatatatatcctaagttggtcaagctgaacttgtcaagctacacagttaggatacatggtacataggaaggtaaaatcggatgaataaggaaaggctgctgctgattggtggtgagtatagccaagggtactttacaccctcacggctaacttttcctagtttagaacaagaaagttttgattatgttgtcccttggaggcctagaaaacaagatagcccaaaatgaagatgaaaaagtccacagtgggaattcagatggactagaattagactagccagttctatagttcaggtgggccagaaatgtcagcactgtagtacgtgcttagattcagcttgggcaaggaatgaagtttagaaagtcatataaagcagtagccctataaagagatcaggatttaagcaaggaggctgagaaagtgtcagtagagcattcatgggactagaggttgatgtttcagatagtcccaaggtagagaactaaggcaagggaaacctaactcatcttggaggccagtaatgatagctttatattatcttgacctgtgctattcaagatggtagccactggccacatgtggctattcagcacttgaaatgtgactagtacaaccaaggaattgaattttaatgttatttaatttaaattaatttaaaattaaattagaaaactgataattgatccagttattataaaacttttaagtatgtttggaataacttgggcatgtgaacctaccttttcaagtgtaaattttattaaatctaaatatagaccaagtatttctgatgagaatttagcatctagattgtgctttgtgtaaaatatatgctagatttagaagatttaatacaaaatttcagttatttatattatacactgaaatgttaatattttggatatattgatttaaatattatgaaaagtaattttacctattttatatggttactggaaatttcaagttacatatatggtttgtattatatttctattggacagcattggtctaagctcaatacactacagccagttttataagtaatgtttagttattttattgtgtaaataagattttattagaatgcagccaagctaatttattaatgtgtttttattagctgtttttgtgctgcagtgtcagagttgagtagttttgacagagatcatctggcctgctaaacctaaaatatttatttgacctttgaagaaagagtgctaaaccctggccttaactctttaaagcagaggcctttttattggggcccaactgagaaggaaaggagcggtagcacctgttcctccagtctcctactttttgtctgtaggcaggttatttcttatccagggcaccttttcctcaaggaactattatttgcaatatatgtgactggcagtgggtgtcatggtatcaacttactggatcctgacttaactgcttctgtcggtcagagttccaacaagaaacagatggcaacactcaaattgaggtaattttaggagggtttatttacaaagggactcatgaaggtatgaatagggtataggaaaaccacaggttttgcctactaggtcatgcgagcctagtgctagcagcagagcagcagagctgttatcatctctaggccataagggattaggagagagagaggttactggatctagaaagagatactgtttatagaatacgctaccttgagaagagcagtgagcttcattgaaatgacgaaggcagcccaaggtggccttatagaaagggagcaggaataagtgtatatcctgacttcatgcttcttcctttccttgatatgccaagactcccattggattgaacccaactgaagccctactgatgtatatcaggtctgggatttgactcttacaagctagtaagttagtcttactgtgtcatggatgctagcagaagacaagactactgggtcagagacaaaggactttattactcacagcacaggaagcagtatgtgcatcagcatattgtgttggttctcattcaccctagttcccattggggtgatatggtggacccatatggatgctgcacatgccttaggtttaggttgcagctgaggaacactgagcttggggaatccgtcactttggtagtaagcagtaatcaagcctgtgcttgtcccagagggaaacattacctcatccttcaaggttgctcactgcagacacaaccctgagaagcggcccaggtaaggagtttaggtcaaagccttgcttttttggtatatacagcaagacatattgaaggactgtctttttgcagcccatatggatcagcattccagggagaccagggtgaagaccagtagaggtgggtttggattggcagatggaagattctggcattctgggtccatagcgttaaattcttatttggattacagccgaatcagcagttctggcctgtgatcagggtgcaatattcttattgttctttctcccatattttcttaatcagaaggaaggacctacttccacaggacaatcttctttagggttgcaatattagaaattagtttctagttgtgtgtgtgtgtggttggcagctgttaaccaataatacaagattttgctttgttaccacaatgctcaaaaatacacaaaatccaagctcataacttgttctctttaccgtctccaagtgaagtaatcataaagaactttaagcgatctattacagcatgttaactagtatccatgtattattttacttttaacacacattatcttgctattttgtgttaactgtcttctggggagtggcctccttatgtactttctatctgggatgatatgatcattgaatgcctacctgatcactgaatgcctatggagtcagcatcttcagataataagaaacagatacctaatgaagcttctgctagaagtgaaagagacacatcagacctagagcaaaactggtcattgcaagatcattatagaatgtattcacccataatataccaagccctctgtgagcacgtgcagactcagatgtcactgatgaatgacttgacttcaaagaacatccctaatggaattcctgctgtaccatgccatgctccctctcattctgaatctcaggcaactcctcattctagttatggcttatgtacctccaccccagtctggtcacttcagcggccaccctgccctccaaaggttcattctgaagttcaaactgatggcaacagtcagtttgcatcacaaggtaaaacagtttctgcaacctgtactgatgttctacggaattcatttaataccagtcctggagttccatgtagcctgcccaaaactgacatatcagctattccaacattgcagcaactgggccttgttaatggaattctgccacaacaaggaattcataaggaaacagacctactaaaatgtattcaaacatatttgtctctttttcgatctcatggaaaagaaccgcatctggacagtcagacacaccgaagccctactcagtcacaaccagctttcttggccactaatgaagaaaaatgtgccagagagcaaattagagaggccacaagtgaaagaagggatttaaacatacatgtgcgagatacaaaaacagtgaaggatgtacagaaggcaaaaaatgtgaacaagacagctgaaaaagttagaattataaaatatttgttgggagagctcaaggccctggtagcagaacaagaggattcagaaattcagaggttgattacagaaatggaggcatgtatatctgtacttccaacagtaagtggaaacacagatattcaagttgagatagcactggccatgcaaccattaagaagtgagaatgctcagttacgaaggcagttgagaattttgaaccagcaactcagagaacaacagaaaactcaaaaaccatctggtgctgtggattgcaaccttgaattgttttctcttcagtcattgaatatgtcactgcaaaatcaattggaggagtcactaaagagccaggaattactgcagagtaaaaatgaagagctgttaaaagtgattgaaaaccagaaagatgaaaacaaaaaatttagtagtatatttaaagacaaagatcaaactatacttgaaaataaacagcaatatgatattgagataacaagaataaaaattgaattggaggaagccctagtcaatgtgaaaagctcccagtttaagttagaaactgctgaaaaggaaaaccagatattggggataacattacgtcagcgtgatgctgaggtgactcgactaagagaattaaccagaactttacagactagcatggcaaagcttctctccgatcttagtgtggacagtgctcgctgcaagcctgggaataaccttaccaaatcactcttgaacattcatgataaacaacttcaacatgacccagctcctgctcacacttccataatgagctatctaaataagttagaaacaaattacagttttacacattcagagccactttctacaattaaaaatgaggaaaccatagagccagacaaaacctatgaaaatgttctgtcctccagaggccctcaaaatagtaacactaggggcatggaggaagcatctgcacctggaattatttctgccctttcaaaacaggattctgatgaagggagtgaaactatggctttaatagaagatgagcataatttggataatacaatttacattccttttgctagaagcactcctgaaaagaaatcaccactttctaagagactatcccctcagccacaaataagagcagctacaacacagctagtcagcaacagtggacttgctgtctctggaaaagaaaataaactgtgtacacctgtaatctgttcctcttcaacaaaggaagcagaagatgcacctgaaaaactttccagagcatctgatatgaaggacacacagctcctcaagaaaataaaggaagcaattggtaagatccctgctgccaccaaggagccagaggaacaaactgcatgtcatggcccatcaggttgtcttagcaacagccttcaagtgaaaggcaatactgtctgtgatggtagtgttttcacttctgacttgatgtctgactggagcatctcttcgttttcaacgttcacttctcgtgatgaacaagacttcagaaatggccttgcggcattagatgccaacatagctagactccagaagtctttaaggactggtcttctggagaaatgaattcagaagaaaattcatcaggtgcttctttttaaaactagaacttggctatattgaatgtgtatttttctttagtgaaatgatgttttatgttattatgtgtgaagtaatatattgtacaagtaataaatgtattgttgagatatattgacactgaggagcttataaaaacaagtcatcttaagttcacaattgctacaagaagaaagttgtggataactaggaaattattgtaagtaatgttttatttcagtacttagcaattagagttcttttattaagatgtatctgctggattaagggtacaggttgaaatagttctgtggctgtcctaagaaataatgggaaaagaatctctggatgtaagtttttctgttgaaactagagggttttttttctgtttacatatacttttttttaatagcaatgtgtttttattaaacatgctgtgtgccacaggccagtgttgttggtgaaatatataaacatttatttaaagagaaaagttaccagtatctacacctcttaaaaaacattgattggtctaaaaaatatatagataacatcctaagttaacatatggcttcttaaaacttgggcacttttatttgtttttatcccaaattcatgttttaaggcctttaaagaatagtcagactgataaagaagtgctaacagataagctatagttggggaaatttgtgggttttttttaaataagaaatgtttatttttgtccttatatttaaacatgatggaatttgtaaatcttggcattgattgtaattctgcctttttggaagaattttttctcccagcatgttagctgagaatattctctattttataaataatatgaagtaggttggtctctctgcttctctataccaggacttcttagctcagtatcatctcccttcatgtaagcagcacgttttaactcttaggaagctgaatgttgtgttatcactaatactttgtacaggtcacctgcctactctaattgtccttagtacttggacaggctttatcattaaagagtgttctcctaatcccaaaaaaaaaaaaaaaaaaa

SEQ ID NO: 208 - DNA, 4729 bp, Homo Sapiens
gcatgcaggcaagatggcggaaggggaggacgtgggatggtggcggagctggctgcagcagagctaccaagcagtcaaagagaagtcctctgaagccttggagtttatgaagcgggacctgacggagtttacccaggtggtgcagcatgacacggcctgtaccatcgcagccacggccagcgtggtcaaggagaagctggctattgcagcctgttcccggggcgcttgcttcctctgcccgttctctatacagacggaaggctcctcaggagcaacagagaagatgaagaaagggttatctgacttcctaggggtgatctcagacacctttgccccttcgccagacaaaaccatcgactgcgatgtcatcaccctgatgggcacaccgtctggcacagctgagccctatgatggcaccaaggctcgcctctatagcctgcagtcggacccagcaacctactgtaatgaaccagatgggcccccggaattgtttgacgcctggctttcccagttctgcttggaggagaagaagggggagatctcagagctccttgtaggcagcccctccatccgggccctctacaccaagatggttccagcagctgtttcccattcagaattctggcatcggtatttctataaagtccatcagttggagcaggagcaggcccggagggacgccctgaagcagcgggcggaacagagcatctctgaagagcccggctgggaggaggaggaagaggagctcatgggcatttcacccatatctccaaaagaggcaaaggttcctgtggccaaaatttctacattccctgaaggagaacctggcccccagagcccctgtgaagagaatctggtgacttcagttgagcccccagcagaggtgactccatcagagagcagtgagagcatctccctcgtgacacagatcgccaacccggccactgcacctgaggcacgagtgctacccaaggacctgtcccaaaagctgctagaggcatccttggaggaacagggcctggctgtggatgtgggtgagactggaccctcaccccctattcactccaagcccctaacgcctgctggccacaccggcggcccagagcccaggcctccagccagagtagagactctgagggaggaggcgcccacagacttacgggtgtttgagctgaactcggatagtgggaagtctacaccctccaacaatggaaagaaaggctcaagcacggacatcagtgaggactgggagaaagactttgacttggacatgactgaagaggaggtgcagatggcactttccaaagtggatgcctccggggaggtgagtgggcctggtgggtcagagggaagcgagcctaatggtcctgggtgtgagagctctccccagccagcccagctgtcccctcaggagggtccctgctcctgtctgaggtgacaggtggtgggaaaggagctggagcttcctgctcagacccacaacattggtcatcagcaggctgcacttttcctcagttccagggtggatagagggtcaagttcttgaccttagctctgtatcaaaattgcctgagaaactgcttaagaaaacagatgtcatgctgagcgcggtggctcacacctgtaatcccaacactttgggaggccaaggtgggaggattgcttgaggcgaggagttcaagaccagcctggccaatatagtgagaccccatttctgtttttgaaaaaaaaaaaaaaaggaaaaaagaaaacagacatcaaaccctgcctgaccttctgagttgtggtcctcaggtatgaggcctgagtatatacttggccttggagacaaaagaccagtgtgatcaagggcaagggcaagttacttaacctgagcccctggttcctcatctaaaacatggaattgatcattataagacctggctataagctgtaatgaggtgatccatgtagacaccttagggctattgcctgagacatggtgaccagcactcaggagacattagtgataaaccccacaaaacccattccagttattaagctcaaggaggccttagtactgttattcttcactacctctcagaatcaaaagtggctcatttagattgagaggctggaacagtccaaagctctcccagctaataagtgacaggactgaggctgcaacccagacatctgattcatgtcagcgttagttccactgtcacataagaaccacatgagtccttccatcatgcaacttatgagcctgttagaaagaggtggacagattagagagacatgtgaagggcctcctttttcatgatgggaaactgaagccttgggggagtattttacctactcaggagtattttgcacttgtgactacctcactatacccaggacagagaaagcccatagtgccctgtcaggccgcaggggcttgctggctttttgtgtctttgcagccccctttaaaacctgacgtgcagtacacgtgagcattctagaacctgctataccagggcttagccgacagcaggccaagagtaggaacaaagcaagaaaacgttccgtggggagacttgagctgggaattagggtgttggtgcccctagtgaagacctagtgggcatctgtaggccactgccacctctgcttttggccacagtgccactcaggcagtggcctccattcacccaaagactaagtaacttgcccttgattacactggtcttttgtgtccagggccaagtatctgctcaggcctcctgagttctctgcttctcagagccatggcattatctgctcagcaggaggcaagttctccttaaaggactgaggctgacttggttcctgtaggcagccatcaccttgtggtgtctggtgttggttgggggaagtgtttcctttaggtctgaggtaatcagagcatcaggcccaccccccaggcagagggcagctctgcccctcagacacattccttaagactaggggttcactctcagtgggacctcagagtatggcctggggtaggggatgggaggtggctctgctcagcaagtggaggttaggtctgggcctgactcaggagtaactatgtgtttgtgatttccattaccccctcccatttgcagctggaagatgtagagtgggaggactgggagtgagggagccagagggagcagctcccccacccatggcatctctcgcctccctcgctcgtctcagcccagccctggaagactgagaatgttcccccaaatctcctctgccaaccagagctctgggcacagattctggtggctccctgctggccctcttgggcctctgctcacacctgggaaggggctctctaaatcccggccagaaactctgacttgtgccaacaataggatgacccaagggagaggaaacctatcctcctcaccagaagagcctgtgtttttctgctgaacacccactgttcctgaggactcctgctgggaagtcccaagggatagttctagcccttctgcctgtgtagacagaagctaaaccaccagtctctctcggaggaagctgagacaacatactctgtccatacataagcaggcagggagggccatgccacctacccttggctaaacagggacagtgaacacattttggttcctatcccagtgggtaagaggcacttatctctgggaaatttgcctctcttgggactctccccctcccaggcattttccattcctggaaaggctcctttggggttcagaatccagagaccaaaccctgacccacctccttcctttcctccagcccacactggtctgtccccatgccttcccagggcttcttcatgtcagatgcacccaagtccttagcccagctgtgccacctgcaggagttcgctcttgcgtttcttcccctccccaagaagggagggggctacttcaggcccttctgtgtgttgcctggcaggataccttgtccaaccagctacccacctcaactcccctgtagtttaggacacaaaacagctaccagcggtacagagcggtgatcaaagccgagtacttacaactctggtaagcctagcttctccgcctcagcccttctgcttctggaagagctatcctgggggtgaacttgaaactctcatcaggcttctgcaaaagctcttcttcctgaagacagacccagcctttgtgctctcaccctccactctggtaaagctgcacctctgggggaatgaggggctgcaggaatctctggagagcctggtgcttcacgatgctgctctggtgattcttgtacctaatctggtgtgctcaccaatgagtgaaagggatcgtgggtcagggacaccgagagagtgaggtcacttccacttcaaaccttcagtgagggggtgggatggagagaatgctgaatcttttttttgacgggatggggtttttctctttgtaattatttctttagtttaattaaccttttggttgtttgtgcaatattatatattttaaattataatgcatctccccagagtattttgtagctgggaaaagaaaaaaggaaaaaaagaaaaaaagattctaacagctgttagttttataattaaaaaagaaagaaaaaaaaaaaaaaaaaaaaaaaaaaaaaaaaaaaaaaaaaaaaaaaaaaaaaaaaaaaaaaaaaaaaaaaaaaaaaaaaaaaaaaaaaaaaaaaaaaaaaaaaaaaaaaaaaaaaaaaaaaaaaaaaaaaaaaa

SEQ ID NO: 209 - DNA, 4048 bp, Homo Sapiens
ggctgcctcgcaggggctgcgcgcagcggcaagaagtgtctgggctgggacggacaggagaggctgtcgccatcggcgtcctgtgcccctctgctccggcacggccctgtcgcagtgcccgcgctttccccggcgcctgcacgcggcgcgcctgggtaacatgcttggggtcctggtccttggcgcgctggccctggccggcctggggttccccgcacccgcagagccgcagccgggtggcagccagtgcgtcgagcacgactgcttcgcgctctacccgggccccgcgaccttcctcaatgccagtcagatctgcgacggactgcggggccacctaatgacagtgcgctcctcggtggctgccgatgtcatttccttgctactgaacggcgacggcggcgttggccgccggcgcctctggatcggcctgcagctgccacccggctgcggcgaccccaagcgcctcgggcccctgcgcggcttccagtgggttacgggagacaacaacaccagctatagcaggtgggcacggctcgacctcaatggggctcccctctgcggcccgttgtgcgtcgctgtctccgctgctgaggccactgtgcccagcgagccgatctgggaggagcagcagtgcgaagtgaaggccgatggcttcctctgcgagttccacttcccagccacctgcaggccactggctgtggagcccggcgccgcggctgccgccgtctcgatcacctacggcaccccgttcgcggcccgcggagcggacttccaggcgctgccggtgggcagctccgccgcggtggctcccctcggcttacagctaatgtgcaccgcgccgcccggagcggtccaggggcactgggccagggaggcgccgggcgcttgggactgcagcgtggagaacggcggctgcgagcacgcgtgcaatgcgatccctggggctccccgctgccagtgcccagccggcgccgccctgcaggcagacgggcgctcctgcaccgcatccgcgacgcagtcctgcaacgacctctgcgagcacttctgcgttcccaaccccgaccagccgggctcctactcgtgcatgtgcgagaccggctaccggctggcggccgaccaacaccggtgcgaggacgtggatgactgcatactggagcccagtccgtgtccgcagcgctgtgtcaacacacagggtggcttcgagtgccactgctaccctaactacgacctggtggacggcgagtgtgtggagcccgtggacccgtgcttcagagccaactgcgagtaccagtgccagcccctgaaccaaactagctacctctgcgtctgcgccgagggcttcgcgcccattccccacgagccgcacaggtgccagatgttttgcaaccagactgcctgtccagccgactgcgaccccaacacccaggctagctgtgagtgccctgaaggctacatcctggacgacggtttcatctgcacggacatcgacgagtgcgaaaacggcggcttctgctccggggtgtgccacaacctccccggtaccttcgagtgcatctgcgggcccgactcggcccttgcccgccacattggcaccgactgtgactccggcaaggtggacggtggcgacagcggctctggcgagcccccgcccagcccgacgcccggctccaccttgactcctccggccgtggggctcgtgcattcgggcttgctcataggcatctccatcgcgagcctgtgcctggtggtggcgcttttggcgctcctctgccacctgcgcaagaagcagggcgccgccagggccaagatggagtacaagtgcgcggccccttccaaggaggtagtgctgcagcacgtgcggaccgagcggacgccgcagagactctgagcggcctccgtccaggagcctggctccgtccaggagcctgtgcctcctcacccccagctttgctaccaaagcaccttagctggcattacagctggagaagaccctccccgcaccccccaagctgttttcttctattccatggctaactggcgagggggtgattagagggaggagaatgagcctcggcctcttccgtgacgtcactggaccactgggcaatgatggcaattttgtaacgaagacacagactgcgatttgtcccaggtcctcactaccgggcgcaggagggtgagcgttattggtcggcagccttctgggcagaccttgacctcgtgggctagggatgactaaaatatttattttttttaagtatttaggtttttgtttgtttcctttgttcttacctgtatgtctccagtatccactttgcacagctctccggtctctctctctctacaaactcccacttgtcatgtgacaggtaaactatcttggtgaatttttttttcctagccctctcacatttatgaagcaagccccacttattccccattcttcctagttttctcctcccaggaactgggccaactcacctgagtcaccctacctgtgcctgaccctacttcttttgctcttagctgtctgctcagacagaacccctacatgaaacagaaacaaaaacactaaaaataaaaatggccatttgctttttcaccagatttgctaatttatcctgaaatttcagattcccagagcaaaataattttaaacaaaggttgagatgtaaaaggtattaaattgatgttgctggactgtcatagaaattacacccaaagaggtatttatctttacttttaaacagtgagcctgaattttgttgctgttttgatttgtactgaaaaatggtaattgttgctaatcttcttatgcaatttccttttttgttattattacttatttttgacagtgttgaaaatgttcagaaggttgctctagattgagagaagagacaaacacctcccaggagacagttcaagaaagcttcaaactgcatgattcatgccaattagcaattgactgtcactgttccttgtcactggtagaccaaaataaaaccagctctactggtcttgtggaattgggagcttgggaatggatcctggaggatgcccaattagggcctagccttaatcaggtcctcagagaatttctaccatttcagagaggccttttggaatgtggcccctgaacaagaattggaagctgccctgcccatgggagctggttagaaatgcagaatcctaggctccaccccatccagttcatgagaatctatatttaacaagatctgcagggggtgtgtctgctcagtaatttgaggacaaccattccagactgcttccaattttctggaatacatgaaatatagatcagttataagtagcaggccaagtcaggcccttattttcaagaaactgaggaattttctttgtgtagctttgctctttggtagaaaaggctaggtacacagctctagacactgccacacagggtctgcaaggtctttggttcagctaagctaggaatgaaatcctgcttcagtgtatggaaataaatgtatcatagaaatgtaacttttgtaagacaaaggttttcctcttctattttgtaaactcaaaatatttgtacatagttatttatttattggagataatctagaacacaggcaaaatccttgcttatgacatcacttgtacaaaataaacaaataacaatgtgctctcgggttgtgtgtctgttcacttttcctccctcagtgccctcattttatgtcattaaatggggctcacaaaccatgcaaatgctatgagatgcatggagggctgccctgtaccccagcacttgtgttgtctggtggtggcaccatctctgattttcaaagctttttccagaggctattattttcactgtagaatgatttcatgctatctctgtgtgcacaaatatttattttctttctgtaaccataacaacttcatatatgaggacttgtgtctctgtgcttttaaatgcataaatgcattataggatcatttgttggaatgaattaaataaacccttcctggggcatctggcgaatcccaaaaaaaaaaaaaaaaa

SEQ ID NO: 210 - DNA, 7839 bp, Homo Sapiens
gtcgccgcggtgctgctgctcagtgggagcgggtcttcgcaactgtctccgcgtggcgcgcgcctctagccgcccttcccctggcggctacggccggagggagcggaggcgagcgggagtcgggctccatggagagcggcggacaactgggcagaggcggagctttcatctcggcaccctggttccagtgacccgcgctagcgtcccgtcccgcccgcgtcggagcggccgccggccccgggactgaccggcctcgccgcacctcccgcaccgactagcgctcccgggcgctcctgcgcccgactcgccctcgcccccactccccggcggggtggcggcggccgggcccccacggcggcggccggagcagcagcagcagcagcaggagcccgcctctatgatgaagttcaagcccaaccagacgcggacctacgaccgcgagggcttcaagaagcgggcggcgtgcctgtgcttccggagcgagcaggaggacgaggtgctgctggtgagtagcagccggtacccagaccagtggattgtcccaggaggaggaatggaacccgaggaggaacctggcggtgctgccgtgagggaagtttatgaggaggctggagtcaaaggaaaactaggcagacttctgggcatatttgagcagaaccaagaccgaaagcacagaacatatgtttatgttctaacagtcactgaaatattagaagattgggaagattctgttaatattggaaggaagagagagtggttcaaagtagaagatgctatcaaagttctccagtgtcataaacctgtacatgcagagtatctggaaaagctaaagctgggttgttccccagccaatggaaattctacagtcccttcccttccggataataatgccttgtttgtaaccgctgcacagacctctgggttgccatctagtgtaagatagagagaactgggtaggcctctcccaccatgtgcagtctcatggggagaggcttctttcgtttcctcgtcaaacatctgattgacgcttgcaaactgtctgaatttgccatgcaaggttttcaaacaatttgcatgtttttcagatgctttcaaatctttttttaaaaaaatagtgtaaaatattttaataagccaaagccatgtggaatttttgtttagatgccttaactgtgccacaccccacaaccccctatattattttggttgtctatttctcacagcatattttcagttttttgtccatttgacatcagtctgtggtttattttgtcatcagattacttgtgggtatacctaccccaaaattgttttctcattcacagcattagcatattcagcaaatccatctgtggtgggaattaaaaatattattggtattaaagaaatccattcaccccaaaacttgttttacaggattacaattttaattcaaaatttccagatttgggctatttctgtatgatccaataacttattttgtcacagggcttaatttgccatttttggggatttgtcgactcattttgtctgaattttcacaactggtattatgtcactagctacctgatacggctatttcccttataactcaatagtaccttaacacaaagtataactctgtagagttggtgaatattttagggaaatattagcaaaatgcatgtagtaaagacatcttatgaaaactgtattcatggaatttgatttagcatgctcagttgccagttcccattatcgatactctttctttgcagaataccttagaaccgttatttccctcagtgtagattgctcttaaaatgtattcagttatttagtggcccccacaggagtggagtcttgaaatctaattctaaatgccagtcagtgatgatcgcatcacagttgagtgaaatggccttcctgttcagctgttagagactgaagattgttagggcaccttagaatgtctcatcttttctaggttgtcaacaggtactatttgtcacataactaactttcgaggcactggaacatacctgaactaagaattaaatcttttactttatactcacttaaaatcaagaatcccatctaaaacacataggtaccttatctgaaactcttgcacttccccaaccagggcagaaatgaggtgggagaagtttgactaaaatgagggatgggggaaagtaaaagatgtttttttttttttgagactcgctttgtcacccaggctggagtgcaatggcacaatctcaactcaccgcaacctccgcctcccgggttcaagcgattctcctgcctcagcctcccgagtagttgggattacaggcgcctgcctccatgcctggctaattttgtatttttagtagagacagggtttcttcatgttggtcaggctggtctcaaactcctaacctcgtgatccgcctgcctcgacctcccaaagtgctgggattacaggcatgagccaccatgcccagccaaagatcatttttttatatagacttcagccctttgtaaatattgtaactggggagtatagagtagaaaaaaagtatagttaaaacatttgttctacaaattaacctttaaaaatataattactgctaaaaatagagtgctgttacacttaaggaaaattagtgccattttggaaatgagatcttgtgccataaatacagctgaactgaatataaatgttcacaaattaatgctgtcaaaggaatgagtaaagcagaaaaacttttaaccagcaacatttcaagtacgtagtgtgatcaaacatgatcatccagaatttttatatttttttctttgtacagaggttacatattctgggtgttcttttataaaggaaacattttaaatcccacaaattgacactttctatcttcaatggactaagatttttttggtcagtaatctctgaaatttccttaaattatatacttaacatagcagagaaactggattgtttttgtatataagactgcttccacctgaaatgctgtcataagtactgggggggtgggggagtgcccatcttgtacatgatattcttagaggtaataaggtaatgatgcatgaatttattttataaactcttggactatgtatttgacatgtaaaatatgtacagtattaacgtcaaccatctctttaaagttagcctataaatattgttgtataattttctttggtcagaaacacttggactgaatagtgacactcggtaaggattttcagtgccatttagcaaaacgtctttagtctatgcaactagcaaaaatctgcataatgcaacaacacagttttcacacttcaaattttacatgaggggttcttcacgattctcctggaacccagtctagcaaaatgagaggaaaggccctagggagatttatttctgttaaatagttaactctgctgagtatgacaaatagtgtctactatctcaaccctccaaaatttgcagagtgttgggactgtcatttgtgattttttttttttttttttggtggggtagttgaataaaattgggcagctaaatttttcagttccatgtgcctcccaaataaaaaacagaaaataagtagtttttgtgaattgacttgcagacaaagtagaaactgtgctgcatgatgttattttgtaaacagatgacattttctgaccaggcacatgccatccaattttctgtcaatcacactgttgtataaagcagcagaactgaaggggaaaaatgattgttgtatacactgaattgctttgcatggtctcatttgagataattgatgtaagaatcctgacttttttatatttggaaacatcaaataaaaatggaaaaaatgatcatggctttaaaaaaaaaacaaaaacacacacacatgaactcagatttgcaaaccaggtttctgaaactttgggtaaggtgtatgcttttaactttgaaatgtataaacacccagcggaaacgtatacctttcagtgcatagtgcattgtgtgcttaccctgggttgtttaaacttgtgttcaaatattccccctccaagtgaaagcctgtcgggaattccacagtaacacctttactgttctcccattgatgatcatatacgttacctcttcctagcggtacatttgtatgatccttactactggaattaccgggttaaaaggaaatgcttaccactaagatgtcagtattctcctcatggatattttcagtctcaatgttgccagtctaatagtatagtatgtggttgctttactgctgttctccccacccccgtggagttgtgtcattattttaatgaatgtgagctcttgacttactctagaattctaatacagatactttctgcactagtatcacttttattattgcagttccatttaaaagcataactggctaagtcaccgccccacccgccgcattacatttcctaaaacatactgctgccaaagaccaactgtagaatccttaagtcctgttcaagtgtcacttcattttttattaggggtttcttagttggagggcatgagaaacttggccctttccaatgttgtcttcacattggagtataagaattctctataggactctttaatttttttttttttttggtagagatggggtcttgctgtgttgcccaggctggtctcaaactcctaggcttaagcagtcctccagcctcagccttctcaaagtgctaggatgattggcatgagccacctcgtctggcctgcaggtctttttaagcatttgctgttcaataataagcatcttctttatgcctagtatttgtgataagagcacaaaacaattttctaatctcaaagagcttatattctagtggggtagagataagtgatttatcttggtgtagttttggcttttttgtttgtttttttgagacagcatctcacactgtcgcccaggctggagtgcagtggtgcaatctcagcttactgtaacctccgcctgccaggttcaagcgattctcctgcctcatcctcccgaggagctgggatcacaggcgcctgccaccacgcccggctaatttttttgtatttttagtagagacggggtttcaccatattggccaggctggtctcaaactcctgacctcgtgatccgcctgcctcggcctccctaagtgctgggattatgggcgtgaaccaccgcacctggcctatcttggtgtttttacatccttcagtatttttcaaggttttacagcttttttatctatagacttataccatcttcaaaagcaatacaattttatttgtagacgtgatttcccccaccaaatgcacattttatggagctctaggacaaaagtcaggatgaaaagtaatctatcgctggtgctactttaataccttcctgactggtgccactggctaaattctagcagtacgatgagagggccattaaggcctatcttagcaagcaagacattatagcaaagacctaaacactcaaaggttcaacgtcttctagccagggaactattctctaattcttccaccttgatatgatttcagcaaattctgataacccggtattactcttaatgcatttttgtaacatttgacaaacatctcccaatatgtagactcccactctcctgatgctaatcagtatcagacaatggaagtaaattttcctgcttttctcaacttttcctcaaattcatgttagtgaagtactttcatttggccatcattatttatcaaccttaagaaacatgcctattgacgaagtaaatatactaggaattcaacgtatctacgggaatgtggacaaagacatataccaagacaaggcactagagtgaaaagccattaaaataaaatgctcagcagcaaaggatttgtaatggttaacttgcaatatatccatatggtgtaatattacagtcattagaaatgacatttgcgtaaggatctgagtggaaactgatacagcctgtcggagagctactgagtagtattttatcacagctgcatacataccctttcacccaacagttccactcctgggagtctagtcaacaaatggacaagttgcacaaccaagctatggtcaaatatgtgtgttgtaggatttatgaaactggtaccaatttaatattcaaatgtgattaagtcatggcaatctatttactggatactttgtggttaccaaagagctatgtgctgccacagggagtcctttcaatagtgattgaaaaaggcagaacactactagacagaactacctgttttatgcatgtattggcatacactgaaaaagcttagtcacttaaaatgaggttgtacagattgtagattttgtttttaaacgcctgtatggtttaaaaaatgttttgggaaatagacatgagcagggcagagaactacaacctacaggccaaaccccaccccactgcctgtttgtacggccaacaagtttaaaatttttttaatgttttaggtttttttttttttaaaaaaaatactatgcccatttgtttacaaatcgtctgtgggtgctttctcactacaatggcagaattcagtagttgagacagacctatggtccacaaaggccgaaatatttactgttttaggagaaaaaaacaacatgaattgtaataacttggacttacttggttgctcagtcctgatgtgtcctgttaaaacctaagagaaacagcaccaagttcaatctagtgcaatcagcctatcacatctaagctgcttttgccagatctgatatctactcccgaccttaagccaggagactttgtaaacttactaggttataataaaacttaagaactatcgatatttactaatctacatcatggaactatttcaaaagcagtcatatggtaagatggatcaggagtctttaaaaataaaactgagaaagaaaaatcatgtgatcaattcagtagtagagacagaggttggtatcaagtctatgttcatacacttaccagtgccacccagcagggccatacaagacacatgaaatgagatcagctcaagggtgacaagatgaaactgggagagggccggggagacccgaactcttaatattggattccacacaagaggaaaaattttagtccagctcccagcatggcagctaatggcaagttagtaccataaagccaactcttggaatatacctgacttccacgataaaatggagatgagtgcaggggtgagtgtatagttaagaaaacaaacaatatattactagtccaggtggtagatgacagatttttattatttacacttctctcaaattattacattcagcatgttttgctttttatgttatttaaagtataaaccctcatataattccctaagatgggtggcatgccaagtagctaaatgaaatatcatcccagcccaaaagtacttattcgaatgaaatattacatttttcttaaataaagcaataaattaggtaccctattatcatggtattttcttttttggccagcttttctagataaggttgtattgctactgcaactaacaaaaaagatgtggcagggctgggcacggtggctcacgcctgtaatcccagcactttgggaggccgaggcgggcagatcacgaggtcaggagatggagaccatcctggcccaacatggtgaaaccccgtctctactaaaaatacaaaaaattggccaggtgtggtggcaggtgtctgtagtcccagctcctcgggaggctgaggcaggagaatcgcttgaacgcgggaggcagaacctgcagtgagccaagatcatgccacagcactccagcctaaactacagagctagaaagtggctagagcagcc

SEQ ID NO: 211 - DNA, 2074 bp, Homo Sapiens
ggggctagaaaagagcgtcgatgccggcggcagtgatgagccctagcacgcgtccgctctttggcggctcggaggagcggctgctgctgctgctgctgctgctggtggcccctttgcagaaaagttctaagaacagtgctgttggctcagtgagatgaggttatcggaaaactttctgtttacacaagagttgcctccttcaaagaagcatgcatggtccttgcaggtcactgtgcccatcactctgcatagtccagctgcactctgcttcacacagctgcctgcccattgcaggcatttgagtttgcaatccatgccttaaactttaaatcacactggctacagcgttgtgtgtttcttggtaaacactgggtaaatcagctcctgtggatgttgactgaagtttctatgtttgcaagctaatcctcagcagtttctttatgtattgctgtccttgaatattagcccatttgaaaacgcctgggaagttcagccatcagtatgtccaagtacaaacttattatgttaagacatggagagggtgcttggaataaggagaaccgtttttgtagctgggtggatcagaaactcaacagcgaaggaatggaggaagctcggaactgtgggaagcaactcaaagcgttaaactttgagtttgatcttgtattcacatctgtccttaatcggtccattcacacagcctggctgatcctggaagagctaggccaggaatgggtgcctgtggaaagctcctggcgtctaaatgagcgtcactatggggccttgatcggtctcaacagggagcagatggctttgaatcatggtgaagaacaagtgaggctctggagaagaagctacaatgtaaccccgcctcccattgaggagtctcatccttactaccaagaaatctacaacgaccggaggtataaagtatgcgatgtgcccttggatcaactgccacggtcggaaagcttaaaggatgttctggagagactccttccctattggaatgaaaggattgctcccgaagtattacgtggcaaaaccattctgatatctgctcatggaaatagcagtagggcactcctaaaacacctggaaggtatctcagatgaagacatcatcaacattactcttcctactggagtccccattcttctggaattggatgaaaacctgcgtgctgttgggcctcatcagttcctgggtgaccaagaggcgatccaagcagccattaagaaagtagaagatcaaggaaaagtgaaacaagctaaaaaatagtctttctcaactgttggctaagaagaaatgcaaaagaagtggcataggagtgtgttatgggtgctgaactctctctctttttccccgattttccagagctaggctgtggagtagagtttgtataggtaactaggtaacttattgtggcccagataaggctttaggatgcctcagtgcttatgtcatagccttatgagttagctttcttgctagccccctagtcggtcaccaaactagtaactagtggggcttaatgaaggtcataagtttctgagatgggagagcaacaagtagagatgaagttaaaggtatttatcattcaagaaatcattattgagtcaccattgacaggcactattctaatcagtagttcactttaatatttaataagattttctgggataacagtaagggatattagataatataccgtatgtatttattactagtcttttcctctaggaaaagggatactttgataattaaggccagaggcccattagttgagaaagtcacagatatatttctccaagaaagccaacaaccaccaccacaatgacagaaatgacaacaaggccctttaacttgtcttctagtttagagacatccttcatttgacatttagtagaattcctctttggccacaagaataagcagcaaataaacaactatggctgttgaggttctcattttggtttgttttaattttttgaactttgggtacctgtaattagtttaaaaataaagttcctgataataaagtgactgaaaatggcaaaaaaaaaaaaaaaaa

SEQ ID NO: 212 - DNA, 1573 bp, Homo Sapiens
ggggcttttgctggtgtagctcgtccggttaccttcaggaagattggataaccaagaaatgactaatcaagagtctgccgtacatgtgaaaatgatgccagaattccagaaaagttcagttcgaatcaagaaccctacaagagtagaagaaattatctgtggtcttatcaaaggaggagctgccaaacttcagataataacggactttgatatgacactcagtagattttcatataaagggaaaagatgcccaacatgtcataatatcattgacaactgtaagctggttacagatgaatgtagaaaaaagttattgcaactaaaggaaaaatactacgctattgaagttgatcctgttcttactgtagaagagaagtacccttatatggtggaatggtatactaaatcacatggtttgcttgttcagcaagctttaccaaaagctaaacttaaagaaattgtggcagaatctgacgttatgctcaaagaaggatatgagaatttctttgataagctccaacaacatagcatccccgtgttcatattttcggctggaatcggcgatgtactagaggaagttattcgtcaagctggtgtttatcatcccaatgtcaaagttgtgtccaattttatggattttgatgaaactggggtgctcaaaggatttaaaggagaactaattcatgtatttaacaaacatgatggtgccttgaggaatacagaatatttcaatcaactaaaagacaatagtaacataattcttctgggagactcccaaggagacttaagaatggcagatggagtggccaatgttgagcacattctgaaaattggatatctaaatgatagagtggatgagcttttagaaaagtacatggactcttatgatattgttttagtacaagatgaatcattagaagtagccaactctattttacagaagattctataaacaagcattctccaagaagacctctctcctgtgggtgcaattgaactgttcatccgttcatcttgctgagagacttatttataatatatccttactctcgaagtgttccctttgtataactgaagtattttcagatatggtgaatgcattgactggaagctccttttctccacctctctcaacacactcctcaccgtatcttttaacccattttaaaaaaaaaaatcttaaagccaaaattagaaaaataactccctacttttccaaagtgaattttgtagtttaatgttatcatgcagcttttgaggagtcttttacactgggaaagtttgtagaaattttaaaataagttttatgaaatggtgaaataatatgcatgattttaagtattgccatttttgtaatttgggttattatgctgatggtatcaccatctcttgaaattgtgttaggtttggttattttgtctggggaaaaaatatttactggaaaagactagcagttagtgttggaaaaacctggtggtgtttacaatgttgctaatcattacaaaacattctatattgaagcactgataataaatatgaaatccaaaaaaaaaaaaaaaaaaaaaaaaaaaaa

SEQ ID NO: 213 - DNA, 2339 bp, Homo Sapiens
atcgcggattacgaaacgccgcggagctgaggcagttccgctggctagtgtgtacgcggcgagcttctcccggcgccgcccgctcggctcccatagcgcccgcgacagcggtccggacgccgcccgaacatggactccgccggccaagatatcaacctgaattctcctaacaaaggtctgctgtctgactccatgacggatgttcctgtcgacacaggtgtggctgcccggactcctgctgttgagggtctgacagaggctgaggaggaggagctcagggctgagcttaccaaggtggaagaggaaattgtcactctgcgccaggtcctggcagccaaggagaggcactgtggagagctcaagaggaggctgggcctctccaccctgggggagctgaaacagaacctgtccaggagctggcatgacgtgcaggtctctagcgcctacaagaagactcaggaaactctttcacaggcaggacagaagacttcagctgccctgtccacagtgggctctgccatcagcaggaagcttggagacatgagcagctactccatccgccactcaataagtatgccagccatgaggaactctgcgaccttcaagtcgtttgaggaccgagttgggaccataaagtctaaggttgtgggtgacagagagaacggcagtgacaacctcccttcctcagcggggagtggtgacaagcccctgtcggatcccgcacctttctaagcctgtggttgcttcacccgctgcagagcacacgcaacccagcctcagcatcacagccgcagctctgttcagcggagcagccagccagggcggatgagcagagccggccctgaggacagtcctgcccatccacgcggagatgtggctgccgcgtttgcatgaatttgaagaacacaggcttgtacacagatgttttacactcacgtttgtagatgaaacagatcactgtgctgtccttcctaggggtgcaggaagtggacagggcggagggtttgaaagaatattgagccaaagcccaggctccctttgggaatcatgttagcccatcagaatgttgaaggattgaagagttctaagcataaaataagtggcattttctgacttcttcctcctcctccttccctgactcacagaaggaatgcaatcacccagcaagtcctacctgttacgcaattttttatctcaaaatgccgaacgagaaaactgtccattttctgagacccccagaaaggaaactgaccctcagcagctgcctgattgttacgcgaatctagctttaacggaagcaaattcattattttttaaatgcagtggacttttcaaaaagtttaaattaggcaaagcagctttagcctcatagaatattatttctttggactcaagctgaaatacaagccttacattgccttatgctttatttctttctaatttttatatgtatatagatgagggttccttaatggttgtgagcattgtgtggaattttacacctggcctgcgtggcagcctcttccagttgaggtgttttatgtcacgcacactccatcccagtgtacaaaacctgcttctcttctcaaccgtggcagctcccgctggctcctatgccctgccctaaagggctcttgagcctctgggaatgggaggggccaagagaaggaaaaccctgtctttagcaccctttaaaagaactgtgccccccttctcagtgctgcctttgcatgggcctggcccggctcacattcgtcagtgactccaaccctcctgcttgctgtacttgggatgaaacgaccccacaggtcaggtggagggtggggcgtgggcatcagccaggattgccgttacagtctttttctcaggagctacaaagatctcttcctgttactaaatagtcgcaccccagcagcctctctcgcacaccggggccctgcatgtcagatggcgtggtctgcagggggagctctgtgccttagtggctcttggcaggacactgagggcctgcctgtggtgtgcccggctctgccactcccgggaggggaagggctgctcagctcaaggtgtcctgttcggtagagcaagtgtcctctgacagccgtgtccccggacagttcagacacccttggggatggcactccacacacgacagagatgcaggggccagggaagcccagcgctcggtgcccttcgtccagggttaaaatcggcctgtggggtgtggtgagaaggcaggttgtgcgggtgttgaccgatgtatcttttccttaaagttattataataatgggtaatttgtcaataaagcattcctttgggggaaaaaaaaaaaaaaaaa

SEQ ID NO: 214 - DNA, 3822 bp, Homo Sapiens
tggctcagccgcggcggtggcgggggcgcaaccagcgggccgaggcggcggcgccagcggcgccttaaatagcatccagagccggcgcggggcagggagtgggctgcagtgacagccggcggcggagcggccggtccacggaggagaattcagcttagagaactatcaacacaggacaatgcaagcccatgagctgttccggtattttcgaatgccagagctggttgacttccgacagtacgtgcgtactcttccgaccaacacgcttatgggcttcggagcttttgcagcactcaccaccttctggtacgccacgagacccaaacccctgaagccgccatgcgacctctccatgcagtcagtggaagtggcgggtagtggtggtgcacgaagatccgcactacttgacagcgacgagcccttggtgtatttctatgatgatgtcacaacattatacgaaggtttccagaggggaatacaggtgtcaaataatggcccttgtttaggctctcggaaaccagaccaaccctatgaatggctttcatataaacaggttgcagaattgtcggagtgcataggctcagcactgatccagaagggcttcaagactgccccagatcagttcattggcatctttgctcaaaatagacctgagtgggtgattattgaacaaggatgctttgcttattcgatggtgatcgttccactttatgatacccttggaaatgaagccatcacgtacatagtcaacaaagctgaactctctctggtttttgttgacaagccagagaaggccaaactcttattagagggtgtagaaaataagttaataccaggccttaaaatcatagttgtcatggatgcctacggcagtgaactggtggaacgaggccagaggtgtggggtggaagtcaccagcatgaaggcgatggaggacctgggaagagccaacagacggaagcccaagcctccagcacctgaagatcttgcagtaatttgtttcacaagtggaactacaggcaaccccaaaggagcaatggtcactcaccgaaacatagtgagcgattgttcagcttttgtgaaagcaacagagaatacagtcaatccttgcccagatgatactttgatatctttcttgcctctcgcccatatgtttgagagagttgtagagtgtgtaatgctgtgtcatggagctaaaatcggatttttccaaggagatatcaggctgctcatggatgacctcaaggtgcttcaacccactgtcttccccgtggttccaagactgctgaaccggatgtttgaccgaattttcggacaagcaaacaccacgctgaagcgatggctcttggactttgcctccaagaggaaagaagcagagcttcgcagcggcatcatcagaaacaacagcctgtgggaccggctgatcttccacaaagtacagtcgagcctgggcggaagagtccggctgatggtgacaggagccgccccggtgtctgccactgtgctgacgttcctcagagcagccctgggctgtcagttttatgaaggatacggacagacagagtgcactgccgggtgctgcctgaccatgcctggagactggaccgcaggccatgttggggccccgatgccgtgcaatttgataaaacttgttgatgtggaagaaatgaattacatggctgccgagggcgagggcgaggtgtgtgtgaaagggccaaatgtatttcagggctacttgaaggacccagcgaaaacagcagaagctttggacaaagacggctggttacacacaggggacattggaaaatggttaccaaatggcaccttgaaaattatcgaccggaaaaagcacatatttaagctggcacaaggagaatacatagcccctgaaaagattgaaaatatctacatgcgaagtgagcctgttgctcaggtgtttgtccacggagaaagcctgcaggcatttctcattgcaattgtggtaccagatgttgagacattatgttcctgggcccaaaagagaggatttgaagggtcgtttgaggaactgtgcagaaataaggatgtcaaaaaagctatcctcgaagatatggtgagacttgggaaggattctggtctgaaaccatttgaacaggtcaaaggcatcacattgcaccctgaattattttctatcgacaatggccttctgactccaacaatgaaggcgaaaaggccagagctgcggaactatttcaggtcgcagatagatgacctctattccactatcaaggtttagtgtgaagaagaaagctcagaggaaatggcacagttccacaatctcttctcctgctgatggccttcatgttgttaattttgaatacagcaagtgtagggaaggaagcgttcgtgtttgacttgtccattcggggttcttctcataggaatgctagaggaaacagaacactgccttacagtcacctcatgttgcagaccatgtttatggtaatacacactttccaaaatgagccttaaaaattgtaaaggggatactataaatgtgctaagttatttgagacttcctcagtttaaaaagtgggttttaaatcttctgtctccctgtttttctaatcaaggggttaggactttgctatctctgagatgtctgctacttgctgcaaattctgcagctgtctgctgctctaaagagtacagtgcactagagggaagtgttccctttaaaaataagaacaactgtcctggctggagaatctcacaagcggaccagagatctttttaaatccctgctactgtcccttctcacaggcattcacagaacccttctgattcgtaagggttacgaaactcatgttcttctccagtcccctgtggtttctgttggagcataaggtttccagtaagcgggagggcagatccaactcagaaccatgcagataaggagcctctggcaaatgggtgctcatcagaacgcgtggattctctttcatggcagaatgctcttggactcggttctccaggcctgattccccgactccatcctttttcaggggttatttaaaaatctgccttagattctatagtgaagacaagcatttcaagaaagagttacctggatcagccatgctcagctgtgacgcctgaataactgtctactttatcttcactgaaccactcactctgtgtaaaggccaacagatttttaatgtggttttcatatcaaaagatcatgttgggattaacttgcctttttccccaaaaaataaactctcaggcaagcatttctttaaagctattaagggagtatatacttgagtacttattgaaatggacagtaataagcaaatgttcttataatgctacctgatttctatgaaatgtgtttgacaagccaaaattctaggatgtagaaatctggaaagttcatttcctgggattcacttctccagggattttttaaagttaatttgggaaattaacagcagttcactttattgtgagtctttgccacatttgactgaattgagctgtcatttgtacatttaaagcagctgttttggggtctgtgagagtacatgtattatatacaagcacaacagggcttgcactaaagaattgtcattgtaataacactacttggtagcctaacttcatatatgtattcttaattgcacaaaaagtcaataatttgtcaccttggggttttgaatgtttgctttaagtgttggctatttctatgttttataaaccaaaacaaaatttccaaaaacaatgaaggaaaccaaaataaatatttctgcatttcaggtgaaaaaaaaaaaaaaaaaa

SEQ ID NO: 215 - DNA, 1694 bp, Homo Sapiens
atggtgccaccagatgcagggcacggaaggctgtgccgctgcgtttggagcccaggaacagattccaaggctgggccccgcagggaggaaaaaacaaagcacgagtcgctctctgcacggaggctgagagatggagccaccgctgaggaagaacacacattcatcaggctggtgaccccggtgtaccagcgctttgtggcgtgtaacaaagactgccgagcagaaaattggagttcaatttgccgtccatcctgcacgcagtgctcagcccattctagtccctggcaggcacctctgtgctttatcataaataataacaccacgcggctctatggccctttccgcagttacagtccccgagcaatttacaagccagattatacacagaagcctgcacatgcctgccggccagcacacaccacacacacgcggcctcctccccagtcactcctagggcccacggccatcctggtgtcacccatctggggctgcacccaatctggagggaagcaggccgttgtgcacccctggacactgggctctgctcctgccctggtcaccttctttatcccttttactggctctcatggttggcagagaacccacgaggtctggtggcccactgccccttgctggaccaaggtcaaggccacttcccctctctttctttccgttttagaaggagcttctggacctcctcccctccaatcagcagtggccctttgtctctaccacagggagtcccgtctctcctcagaacttattgggagtagtgggggggtgcaaaagcagcaacagggacccacaagttcaaccgctcgcttcacagacgagacccctggggcccagagaggtgcagcagcttccctgaggactctgcatcagctgctgagctgagaccaaagcccaggaccaccggcacccagtccactacacagcggagccccaaggagggaggtaaacaaaggtctagggcagactgggctgctccctctgagcatctagaaacttccccagaagcagaagcttcaggcagggcctggaggggctccagcagcagctccttccccctcttgccatcaaactaaataagaggtcaactattgtatgatgccatttatatgagatatccagagtaggtagatccatagagatggggctcagattggtgactggcaggtggttgggagagaggggaatggggagtgactgtgagtgggtacaggcttccttctggggtgatgaaagtattctggaactcagtggtggttgtacatcattgtgaatgtactaagtgccactgaattgctcacttgaaaatgattttttttttttttttttttttgagaccgggtctcgctctgctgcccaggcgggagtgtggtggtgcaatcatagctcactgcagccttgaactcccaggctcaagtgatcctccactttagcctctcgagtacctgggaccacaggcgcgtgccaccatgcttggctaatattttgtatttttagtagagatgaggttttgacacgttgcccaggctgatctcgaactcttggactcaagcaatgtacccacctcggcctcccaaagtgctaggattaaggcatgagtcagtcttaaaatggctaattttatgtcatgcaaatcttatccccatcaaaaaaataaaaaaaaataaaaaacatacaatggg

SEQ ID NO: 216 - DNA, 758 bp, Homo Sapiens
ctctctgatctgactaacctctttcattctttgccctatgttatatggcttagaccaaagcctgagacatttaaccaatttataaatattaaatgcagaaggcatactttatcagttcctggaaacatcaaagaagctggaaggggaatggaaattggatggcactttgtggaggtcactttgctgacagtcaagtattcaaagatctcctaagatacccggtctttaaagtattatacaaaatatcaggcccagtcccaaggcgcaacttgtgccagcagcccgcgccagcagcctgcaccagcaaaatagcagtagcaagaagagagccagcagaagacacctaccctggccggaagacgcgtacccctgaagattgaggaagaggccatccgggtacaacgtagcagttacgtcagactaagacacttcctgtttataggagactataaaacctttgccctgtcctcactaggggctgacaccattttagtcctcagaccgcctgcacccaggcgctcattaaaacagcatgttgcttccaccgcctcatgttgtctgttggcgcgctctcggggttcgaaccagtacaagaaccttagatatatgatactgcacctaataaaaatagtctaaaataacaacagccaatataggcacaaacctgaaagtgtctgcatagaagtaacacatccatgtacttgataaactaaagtgtagatattttatgcggaataaactttgaagtgaggaatacc

SEQ ID NO: 217 - DNA, 5002 bp, Homo Sapiens
aggagggggttgggaggggagaggacgcgggcgaggaagaccagccccggggccccgatgttgtgactgtgacagactcactggggtttgtacatgctggggaggagccttcctttcaggggtgaccacattcatctgggcatgcctgcagtactcttggcccatggacctgaaggagaagcacctgggcgagcctccctcagccctgggcctgtccacgcggaaggccctcagcgtcctgaaggagcagctggaggcagtgctggaaggacatctcagggagcggaagaagtgtctgacgtggaaggaggtgtggagaagcagcttcctccaccacagtaaccgctgctcctgcttccactggccgggggcctcactcatgctactggccgtgctgctgctgctgggctgctgcgggggacagccagccgggagccgtggggtggggctggtgaatgcctcggccttgttcctgttactgcttctcaaccttgtgctcatcgggcggcaagaccggctgaagcgtcgggaggtagagcggaggctgcgagggatcattgaccaaatccaagatgccctcagggatggcagggagatccagtggcccagtgccatgtatccagacctccacatgccttttgcgccatcctggtccttgcactgggcctacagagacggacacctggtcaacctgccagtcagcctgctggttgaaggagacatcatagctttgaggcctggccaggaatcgtttgcttctctgagggggatgaaggatgacgagcacatcgtcctggagccgggagacctcttcccccccttctcccctccaccctcaccccggggagaagtggagagagggccacagagcccccagcagcaccggcttttccgtgtccttgagacccctgtgattgacaacatcagatggtgcctggacatggccctgtcccgaccagtcactgccctggacaatgagcggttcacagtgcagtcggtgatgctacactatgctgtgcccgtggtcctggccggcttcctcatcaccaatgccctgcgcttcatcttcagtgccccgggggtcacttcctggcagtacaccctcctccagctccaggtgaatggcgtcctgcccatcctccccctgctctttccagtcctctgggttctggcaactgcctgtggagaggcccgtgtcctggcccagatgagcaaggcctcacccagctccctgctggctaagttctcagaggatactctcagcagctatacggaggctgtctcctctcaggaaatgctgcgctgcatttggggccacttcctgagggtgctcggggggacatcgccaacgctgagccacagttccagcctgctgcacagcctgggctctgtcacggtcctgtgctgtgtggacaaacaggggatcctgtcatggccaaatcccagcccagagactgtactgttcttcagcgggaaggtggagccccctcacagcagccatgaggacctcaccgatggcctatccacccgctccttctgccatcccgagccccatgaacgagacgccctcttggctggctccctgaacaacaccctgcacctttccaatgagcaggagcgtggcgactggcctggcgaggctcccaagccccccgagccctattcacaccacaaagcgcatggccgcagcaaacacccatctggctccaacgtgagcttcagcagggacaccgagggtggtgaagaagagcccagcaagacccagcctgggatggagagcgacccctacgaagcagaggactttgtgtgtgactaccacctggagatgctgagcctgtcccaggaccagcagaacccctcctgcatccagtttgatgactccaactggcagctgcacctcacctccctcaaacccctgggcctcaatgtgctgctgaacctgtgtgatgccagcgtcaccgagcgcctgtgccgattctccgaccacctgtgcaacattgccctgcaagagagccacagcgccgtgctgcccgtccatgtgccctggggcctctgcgagcttgcccgcctcattggcttcactcctggggccaaggagcttttcaagcaggagaaccatctggcgctgtaccgcctccccagtgccgagacaatgaaggagacatcgctggggcggctctcctgtgtcaccaagcggcggcctcccctcagccacatgatcagcctcttcattaaagacaccaccaccagcacagagcagatgctgtcccatggcaccgctgatgtggtcttagaggcctgcacagacttctgggacggagctgacatctaccctctctcgggatctgacagaaagaaagtgctggacttctaccagcgagcctgcctgtctgggtattgctctgccttcgcctacaagcccatgaactgcgccctgtcctctcagctcaatggcaagtgcatcgagctggtacaggtgcccggccaaagcagcatcttcaccatgtgcgagctgcccagcaccatccccatcaagcagaacgcccgccgcagcagctggagctctgacgaagggatcggggaggtgctggagaaggaagactgcatgcaggccctgagcggccagatcttcatgggcatggtgtcctcccagtaccaggcccggctggacatcgtgcgcctcattgatgggcttgtcaacgcctgcatccgctttgtctacttctctttggaggatgagctcaaaagcaaggtgtttgcagaaaaaatgggcctggagacaggctggaactgccacatctccctcacacccaatggtgacatgcctggctccgagatccccccctccagccccagccacgcaggctccctgcatgatgacctgaatcaggtgtcccgagatgatgcagaagggctcctcctcatggaggaggagggccactcggacctcatcagcttccagcctacggacagcgacatccccagcttcctggaggactccaaccgggccaagctgccccggggtatccaccaagtgcggccccacctgcagaacattgacaacgtgcccctgctagtgccccttttcaccgactgcaccccagagaccatgtgtgagatgataaagatcatgctagagtacggggaggtgacctgctgcctgggcagctctgccaacctgcggaacagctgcctcttcctccagagcgacatcagcattgccctggatcccctgtacccatcccgttgctcctgggagacctttggctacgccaccagcatcagcatggcccaggcctcggatggcctttctcccctgcagctgtcagggcagctcaacagcctgccctgttccctgacctttcgccaggaggagaccatcagcatcatccggcttatcgaacaggctcggcatgccacctatggcatccgtaagtgcttcctcttcctgctgcagtgccagctgactcttgtggtcatccagttcctttcttgcctggtccagctgccgccactcctgagtaccaccgacatcctgtggctgtcctgcttttgctaccctctgctcagcatctctctgctcgggaagcccccccatagctccatcatgtctatggcaacggggaaaaacctccagtccattcccaagaagacccagcactacttcctgctctgcttcctgctcaagttcagcctcaccatcagctcctgcctcatctgctttggcttcacactgcagagcttctgtgacagctcccgggaccgcaacctcaccaactgctcctccgtcatgctgcccagcaacgacgacagggctccagcctggtttgaggactttgccaatggactgctgtcggctcagaagctcacggcagccctgattgtcctgcacactgtcttcatttccatcacccatgtgcatcgcaccaagcccctgtggagaaagagccccttgaccaacctctggtgggccgtgacagtgcctgtggtgctgctgggtcaggtggtccagacggctgtggacctgcagctgtggacacacagggacagccacgtccactttggcctggaggacgtgcccctgctgacatggctcctgggctgcctgtccctggtccttgtggtggtgaccaatgagatcgtgaagctacatgagattcgggtccgagtccgctaccagaagcgacagaagctgcagtttgaaactaagctgggcatgaactctcccttctgagccactggctgtggtggctgtagttgcccccgtccctggggctaaagccagacccatttctgaacaggggagtttgtatcatgaatgtttccaggtttgctcctgcacccgtggcactggaaacccagctccccgtgtcagaccccgctgtcttcctgagccctggggctcactgtggaggagctgacggcctgggcccttggccagtcctggctcttccctgggcctcaccagggacactcttgaatgtatggcctcaggcgctccctagagggggcctaaaccccctcacctgtgagctaccccctttagggatcccttgcccccttggagatcccttgccccccagtgcctctgctcgtgggtccctggacacggccttgaagccaaccttctttggaggagcaacagcagcagccttggccgacgcgtccaactcccaaggctgccgtggagggcaggggggtggtgcttgcctggatgtggccccgagtgcctcccctccctccctctgtgggggagtctcccgcctgaacctgaagatggagcagggcccccgcttcgccctggagcctcttcctgtgcctggctcaagctggctgcctgtcagtcttggggaatctggcccaggtctcctcagcctctgccccagttctgggagaagtttctactggtgtatattttttactggaaatgagccttttaggaatgaatgtagactggtttgtattaaaatgtgtcaattgctaaggaaaaaaaaaaaaaaaa

SEQ ID NO: 218 - DNA, 2501 bp, Homo Sapiens
cgaaaagattcttaggaacgccgtaccagccgcgtctctcaggacagcaggcccctgtccttctgtcgggcgccgctcagccgtgccctccgcccctcaggttctttttctaattccaaataaacttgcaagaggactatgaaagattatgatgaacttctcaaatattatgaattacatgaaactattgggacaggtggctttgcaaaggtcaaacttgcctgccatatccttactggagagatggtagctataaaaatcatggataaaaacacactagggagtgatttgccccggatcaaaacggagattgaggccttgaagaacctgagacatcagcatatatgtcaactctaccatgtgctagagacagccaacaaaatattcatggttcttgagtactgccctggaggagagctgtttgactatataatttcccaggatcgcctgtcagaagaggagacccgggttgtcttccgtcagatagtatctgctgttgcttatgtgcacagccagggctatgctcacagggacctcaagccagaaaatttgctgtttgatgaatatcataaattaaagctgattgactttggtctctgtgcaaaacccaagggtaacaaggattaccatctacagacatgctgtgggagtctggcttatgcagcacctgagttaatacaaggcaaatcatatcttggatcagaggcagatgtttggagcatgggcatactgttatatgttcttatgtgtggatttctaccatttgatgatgataatgtaatggctttatacaagaagattatgagaggaaaatatgatgttcccaagtggctctctcccagtagcattctgcttcttcaacaaatgctgcaggtggacccaaagaaacggatttctatgaaaaatctattgaaccatccctggatcatgcaagattacaactatcctgttgagtggcaaagcaagaatccttttattcacctcgatgatgattgcgtaacagaactttctgtacatcacagaaacaacaggcaaacaatggaggatttaatttcactgtggcagtatgatcacctcacggctacctatcttctgcttctagccaagaaggctcggggaaaaccagttcgtttaaggctttcttctttctcctgtggacaagccagtgctaccccattcacagacatcaagtcaaataattggagtctggaagatgtgaccgcaagtgataaaaattatgtggcgggattaatagactatgattggtgtgaagatgatttatcaacaggtgctgctactccccgaacatcacagtttaccaagtactggacagaatcaaatggggtggaatctaaatcattaactccagccttatgcagaacacctgcaaataaattaaagaacaaagaaaatgtatatactcctaagtctgctgtaaagaatgaagagtactttatgtttcctgagccaaagactccagttaataagaaccagcataagagagaaatactcactacgccaaatcgttacactacaccctcaaaagctagaaaccagtgcctgaaagaaactccaattaaaataccagtaaattcaacaggaacagacaagttaatgacaggtgtcattagccctgagaggcggtgccgctcagtggaattggatctcaaccaagcacatatggaggagactccaaaaagaaagggagccaaagtgtttgggagccttgaaagggggttggataaggttatcactgtgctcaccaggagcaaaaggaagggttctgccagagacgggcccagaagactaaagcttcactataatgtgactacaactagattagtgaatccagatcaactgttgaatgaaataatgtctattcttccaaagaagcatgttgactttgtacaaaagggttatacactgaagtgtcaaacacagtcagattttgggaaagtgacaatgcaatttgaattagaagtgtgccagcttcaaaaacccgatgtggtgggtatcaggaggcagcggcttaagggcgatgcctgggtttacaaaagattagtggaagacatcctatctagctgcaaggtataattgatggattcttccatcctgccggatgagtgtgggtgtgatacagcctacataaagactgttatgatcgctttgattttaaagttcattggaactaccaacttgtttctaaagagctatcttaagaccaatatctctttgtttttaaacaaaagatattattttgtgtatgaatctaaatcaagcccatctgtcattatgttactgtcttttttaatcatgtggttttgtatattaataattgttgactttcttagattcacttccatatgtgaatgtaagctcttaactatgtctctttgtaatgtgtaatttctttctgaaataaaaccatttgtgaatataaaaaaaaaaaaaaaaaaaaaaaaaaaaaaaaaaaaaaaaaaaaaaaaaaaaaaaaaaaaaaa

SEQ ID NO: 219 - DNA, 2061 bp, Homo Sapiens
aaaaggaggacgtagaaaaggggacaccggaaactcactcttcacccggaaatggttattgaggaacatggcgttgctggtgcgagtccttaggaaccagactagcatttctcagtgggttccagtatgcagccgattgatacctgtgtctcctacccaaggacagggggacagggctctgtctcgcacttcccagggtgtcagatgcctgatacattcaattcatggtttcttataaccctactccacgtctggatgtgtctagtccgaatgaagcaggaaggccggagtgggaagtacatgtgtcgtatcatagttcattttatgtgggaggatgttcagcagcgcggcagagtcatgggggttaatccctatatcctgaagaagaacatgatcctcatgacaaatcatttctatgcagcgatcttgggatatgatgaggggatcctttcagatgatcatgggctggccgctgccctctggagaaccttcttcaaccggaaatgtgaagaccctcgacatcttgaattgctggtagagtatgtgaggaaacagatacagtacctggactccatgaacggggaggatctgcttctgacaggggaggtgagctggcgccctctagtggagaagaatcctcagagcatcctgaagccccattctccgacttacaacgacgagggactttgatgggctgggccctccgcacggcccgccagctggcttcgaggaacctccaggagagaagtgcctgttggtccaggaccctgcagaaagtggcctgaactgacctctgaacagcatctgtcaaatacctggccccatttgtgttgagtttcctcttagtgtgcccaggagtctgatctgctggggtacagggctgggagaacccctagctctcccggggtgtcctctcccttaggggaagccccgagtgagagtcccccagcacacactccccaaccccctccagcaactacatgtgactgatagcttttcccaaaggccaaggaagggatggtgtaggttcaaaagggaaaccccccagggcctgctgtggcctaggagcagattgtaatgctgccgagtccggtcggtgaccacgcgttgtccctcggctttcagccatggggttgagttggccattaaaagaaacagagacttctctctgccatggcccttctttattccagggacttagaaacttgcctgagatggtggacgcagtaatgagggcaccgcgcagctcagttagagacggagaaagggaagaggctgggatggtctctgctgctcttgcctctagttcatggagatgtgtctctgttcaggccaagatacagccagccaggcctgtcgtctgggacccaggaggcctctgatgaccaagggctttcacatcctaagtcatttggaaggaggccttgagaacaaagtcacctttgtcactcccagtgaactgaatgaggaacatgctgtctcctgtcttggcctcccctttcatgagatactggggagaagagaacattcctcctggcttagttgtagcagacccagacctgtgcccagctttggtcccccttcccaacttctgaagcacgtgctgcagagccaccttggtctgagcacctgaggaccagcccctcctccctcagtgcgggtcatctcttgggggattttcttaaagtgaagaaagggggtggggaaccatattgcccctccctcccccatcaaacttccttcatttaacttgctataaaatgagtcatataaagaaactctatatgggtgaggtatatcccacttctgtgaaaacattacaaatcaaaccgcttctctcagtttatttaagatgcttttgttgcgagcggagctctagagtgaagcctcctgtgtgtgtgtgagataataacaccttgtaactcattacagctgggcactatttacataaaccagagctgagccaggcaggaatttgctgattaatttatttttaatggagtgaagtataccatgcaccaaaataaactttactgtgtgtacctaaaaaaaaaaaaaaaa

SEQ ID NO: 220 - DNA, 5616 bp, Homo Sapiens
ccccggcgcagcgcggccgcagcagcctccgccccccgcacggtgtgagcgcccgacgcggccgaggcggccggagtcccgagctagccccggcggccgccgccgcccagaccggacgacaggccacctcgtcggcgtccgcccgagtccccgcctcgccgccaacgccacaaccaccgcgcacggccccctgactccgtccagtattgatcgggagagccggagcgagctcttcggggagcagcgatgcgaccctccgggacggccggggcagcgctcctggcgctgctggctgcgctctgcccggcgagtcgggctctggaggaaaagaaagtttgccaaggcacgagtaacaagctcacgcagttgggcacttttgaagatcattttctcagcctccagaggatgttcaataactgtgaggtggtccttgggaatttggaaattacctatgtgcagaggaattatgatctttccttcttaaagaccatccaggaggtggctggttatgtcctcattgccctcaacacagtggagcgaattcctttggaaaacctgcagatcatcagaggaaatatgtactacgaaaattcctatgccttagcagtcttatctaactatgatgcaaataaaaccggactgaaggagctgcccatgagaaatttacaggaaatcctgcatggcgccgtgcggttcagcaacaaccctgccctgtgcaacgtggagagcatccagtggcgggacatagtcagcagtgactttctcagcaacatgtcgatggacttccagaaccacctgggcagctgccaaaagtgtgatccaagctgtcccaatgggagctgctggggtgcaggagaggagaactgccagaaactgaccaaaatcatctgtgcccagcagtgctccgggcgctgccgtggcaagtcccccagtgactgctgccacaaccagtgtgctgcaggctgcacaggcccccgggagagcgactgcctggtctgccgcaaattccgagacgaagccacgtgcaaggacacctgccccccactcatgctctacaaccccaccacgtaccagatggatgtgaaccccgagggcaaatacagctttggtgccacctgcgtgaagaagtgtccccgtaattatgtggtgacagatcacggctcgtgcgtccgagcctgtggggccgacagctatgagatggaggaagacggcgtccgcaagtgtaagaagtgcgaagggccttgccgcaaagtgtgtaacggaataggtattggtgaatttaaagactcactctccataaatgctacgaatattaaacacttcaaaaactgcacctccatcagtggcgatctccacatcctgccggtggcatttaggggtgactccttcacacatactcctcctctggatccacaggaactggatattctgaaaaccgtaaaggaaatcacagggtttttgctgattcaggcttggcctgaaaacaggacggacctccatgcctttgagaacctagaaatcatacgcggcaggaccaagcaacatggtcagttttctcttgcagtcgtcagcctgaacataacatccttgggattacgctccctcaaggagataagtgatggagatgtgataatttcaggaaacaaaaatttgtgctatgcaaatacaataaactggaaaaaactgtttgggacctccggtcagaaaaccaaaattataagcaacagaggtgaaaacagctgcaaggccacaggccaggtctgccatgccttgtgctcccccgagggctgctggggcccggagcccagggactgcgtctcttgccggaatgtcagccgaggcagggaatgcgtggacaagtgcaaccttctggagggtgagccaagggagtttgtggagaactctgagtgcatacagtgccacccagagtgcctgcctcaggccatgaacatcacctgcacaggacggggaccagacaactgtatccagtgtgcccactacattgacggcccccactgcgtcaagacctgcccggcaggagtcatgggagaaaacaacaccctggtctggaagtacgcagacgccggccatgtgtgccacctgtgccatccaaactgcacctacggatgcactgggccaggtcttgaaggctgtccaacgaatgggcctaagatcccgtccatcgccactgggatggtgggggccctcctcttgctgctggtggtggccctggggatcggcctcttcatgcgaaggcgccacatcgttcggaagcgcacgctgcggaggctgctgcaggagagggagcttgtggagcctcttacacccagtggagaagctcccaaccaagctctcttgaggatcttgaaggaaactgaattcaaaaagatcaaagtgctgggctccggtgcgttcggcacggtgtataagggactctggatcccagaaggtgagaaagttaaaattcccgtcgctatcaaggaattaagagaagcaacatctccgaaagccaacaaggaaatcctcgatgaagcctacgtgatggccagcgtggacaacccccacgtgtgccgcctgctgggcatctgcctcacctccaccgtgcagctcatcacgcagctcatgcccttcggctgcctcctggactatgtccgggaacacaaagacaatattggctcccagtacctgctcaactggtgtgtgcagatcgcaaagggcatgaactacttggaggaccgtcgcttggtgcaccgcgacctggcagccaggaacgtactggtgaaaacaccgcagcatgtcaagatcacagattttgggctggccaaactgctgggtgcggaagagaaagaataccatgcagaaggaggcaaagtgcctatcaagtggatggcattggaatcaattttacacagaatctatacccaccagagtgatgtctggagctacggggtgaccgtttgggagttgatgacctttggatccaagccatatgacggaatccctgccagcgagatctcctccatcctggagaaaggagaacgcctccctcagccacccatatgtaccatcgatgtctacatgatcatggtcaagtgctggatgatagacgcagatagtcgcccaaagttccgtgagttgatcatcgaattctccaaaatggcccgagacccccagcgctaccttgtcattcagggggatgaaagaatgcatttgccaagtcctacagactccaacttctaccgtgccctgatggatgaagaagacatggacgacgtggtggatgccgacgagtacctcatcccacagcagggcttcttcagcagcccctccacgtcacggactcccctcctgagctctctgagtgcaaccagcaacaattccaccgtggcttgcattgatagaaatgggctgcaaagctgtcccatcaaggaagacagcttcttgcagcgatacagctcagaccccacaggcgccttgactgaggacagcatagacgacaccttcctcccagtgcctgaatacataaaccagtccgttcccaaaaggcccgctggctctgtgcagaatcctgtctatcacaatcagcctctgaaccccgcgcccagcagagacccacactaccaggacccccacagcactgcagtgggcaaccccgagtatctcaacactgtccagcccacctgtgtcaacagcacattcgacagccctgcccactgggcccagaaaggcagccaccaaattagcctggacaaccctgactaccagcaggacttctttcccaaggaagccaagccaaatggcatctttaagggctccacagctgaaaatgcagaatacctaagggtcgcgccacaaagcagtgaatttattggagcatgaccacggaggatagtatgagccctaaaaatccagactctttcgatacccaggaccaagccacagcaggtcctccatcccaacagccatgcccgcattagctcttagacccacagactggttttgcaacgtttacaccgactagccaggaagtacttccacctcgggcacattttgggaagttgcattcctttgtcttcaaactgtgaagcatttacagaaacgcatccagcaagaatattgtccctttgagcagaaatttatctttcaaagaggtatatttgaaaaaaaaaaaaagtatatgtgaggatttttattgattggggatcttggagtttttcattgtcgctattgatttttacttcaatgggctcttccaacaaggaagaagcttgctggtagcacttgctaccctgagttcatccaggcccaactgtgagcaaggagcacaagccacaagtcttccagaggatgcttgattccagtggttctgcttcaaggcttccactgcaaaacactaaagatccaagaaggccttcatggccccagcaggccggatcggtactgtatcaagtcatggcaggtacagtaggataagccactctgtcccttcctgggcaaagaagaaacggaggggatggaattcttccttagacttacttttgtaaaaatgtccccacggtacttactccccactgatggaccagtggtttccagtcatgagcgttagactgacttgtttgtcttccattccattgttttgaaactcagtatgctgcccctgtcttgctgtcatgaaatcagcaagagaggatgacacatcaaataataactcggattccagcccacattggattcatcagcatttggaccaatagcccacagctgagaatgtggaatacctaaggatagcaccgcttttgttctcgcaaaaacgtatctcctaatttgaggctcagatgaaatgcatcaggtcctttggggcatagatcagaagactacaaaaatgaagctgctctgaaatctcctttagccatcaccccaaccccccaaaattagtttgtgttacttatggaagatagttttctccttttacttcacttcaaaagctttttactcaaagagtatatgttccctccaggtcagctgcccccaaaccccctccttacgctttgtcacacaaaaagtgtctctgccttgagtcatctattcaagcacttacagctctggccacaacagggcattttacaggtgcgaatgacagtagcattatgagtagtgtggaattcaggtagtaaatatgaaactagggtttgaaattgataatgctttcacaacatttgcagatgttttagaaggaaaaaagttccttcctaaaataatttctctacaattggaagattggaagattcagctagttaggagcccaccttttttcctaatctgtgtgtgccctgtaacctgactggttaacagcagtcctttgtaaacagtgttttaaactctcctagtcaatatccaccccatccaatttatcaaggaagaaatggttcagaaaatattttcagcctacagttatgttcagtcacacacacatacaaaatgttccttttgcttttaaagtaatttttgactcccagatcagtcagagcccctacagcattgttaagaaagtatttgatttttgtctcaatgaaaataaaactatattcatttccactctaaaaaaaaaaaaaaaaa

SEQ ID NO: 221 - DNA, 4378 bp, Homo Sapiens
ggggcggtcggaacatggcggaccagatcccgctttacccggtgcgtagcgcagcggcggccgcagccaaccgcaaacgcgcggcctactacagcgccgcggggcccaggccgggagccgaccggcacagcaggtaccagctggaggatgagtctgcgcatttggatgaaatgccactaatgatgtctgaagaaggctttgagaatgaggaaagtgattaccacaccttaccacgagccaggataatgcaaaggaaaagaggactggagtggtttgtctgtgatggctggaagttcctctgtaccagttgctgtggttggctgataaatatttgtcgaagaaagaaagagctgaaagctcgcacagtatggcttggatgtcctgaaaagtgtgaagaaaaacatcccaggaattctataaaaaatcaaaaatacaatgtgtttacctttatacctggggttttgtatgaacaattcaagtttttcttgaatctctattttctagtaatatcctgctcacagtttgtaccagcattgaaaataggctatctctacacctactgggctcctctgggatttgtcttggctgttactatgacacgggaagcaattgatgaatttcggcgttttcagcgtgacaaggaagtgaattcacaactatatagcaagcttacagtaagaggtaaagtgcaagttaagagttcagacatacaagttggagacctcatcatagtggaaaagaatcaaagaattccatcggacatggtgtttcttaggacttcagaaaaagcaggttcgtgttttattcgaactgatcaactagatggtgaaactgactggaagctgaaggtggcagtgagctgcacgcaacagctgccggctctgggggaccttttttctatcagtgcttatgtttatgctcagaaaccacaaatggacattcacagtttcgaaggcacatttaccagggaagacagtgacccgcccattcatgaaagtctcagcatagaaaatacattgtgggcaagcaccattgttgcatcaggtactgtaataggtgttgtcatttataccggaaaagagactcgaagtgtaatgaacacatccaatccaaaaaataaggttggtttgttggaccttgaactcaatcggctgacgaaagcgctatttttggctttagttgctctttccattgttatggtaaccttacaaggatttgtgggtccatggtaccgcaatctttttcggttccttctcctcttttcttacatcattcccataagtttgcgtgtgaacttggacatgggcaaagcggtgtatggatggatgatgatgaaagatgagaacatccctggcacggtcgttcggaccagcactatcccagaggaacttgggcgcctggtgtatttattgacagacaaaacaggaaccctcacccagaatgaaatgatatttaagcggctgcacctgggcaccgtgtcctatggcgccgacacgatggatgagatccagagccatgtcagggactcctactcacagatgcagtctcaagctggtggaaacaatactggttcaactccactaagaaaagcccaatcttcagctcccaaagttaggaaaagtgtcagtagtcgaatccatgaagccgtgaaagccatcgtgctgtgtcacaacgtgacccccgtgtatgagtctcgggccggcgttactgaggagactgagttcgcagaggctgaccaagacttcagtgatgagaatcgcacctaccaggcttccagcccggatgaggtcgctctggtgcagtggacagagagtgtgggcctcacgctggtcagcagggacctcacctccatgcagctgaagacccccagtggccaggtcctcagcttctgcattctgcagctgtttcccttcacctccgagagcaagcggatgggcgtcatcgtcagggatgaatccacggcagaaatcacattctacatgaagggcgctgacgtggccatgtctcctatcgtgcagtataatgactggctggaagaggagtgcggaaacatggctcgcgaaggactgcggaccctcgtggttgcaaagaaggcgttgacagaggagcagtaccaggactttgagagccgatacactcaagccaagctgagcatgcacgacaggtccctcaaggtggccgcggtagtcgagagcctggagagggagatggaactgctgtgcctcaccggcgtggaggaccagctgcaggcagacgtgcggcccacgctggagatgctgcgcaacgccgggatcaagatatggatgctaacaggcgataaactcgagacagctacctgcattgccaaaagttcacatctcgtgtctagaacacaagatattcatattttcagacaggtaaccagtcggggagaggcacatttggagctgaatgcatttcgaaggaagcatgattgtgcactagtcatatctggggactctctggaggtttgtctaaagtactacgagcatgaatttgtggagctggcctgccagtgccctgccgtggtttgctgccgctgctcacccacccagaaggcccgcattgtgacactgctgcagcagcacacagggagacgcacctgcgccatcggtgatggaggaaatgatgtcagcatgattcaggcagcagactgtgggattgggattgagggaaaggagggtaaacaggcctcgctggcggccgacttctccatcacgcagttccggcacataggcaggctgctcatggtgcacgggcggaacagctacaagaggtcggcggcactcggccagttcgtcatgcacaggggccttatcatctccaccatgcaggctgtgttttcctcagtcttctacttcgcatccgtccctttgtatcagggcttcctcatggtggggtatgccaccatatacaccatgttcccagtgttctccttagtgctggaccaggacgtgaagccagagatggcgatgctctacccggagctgtacaaggacctcaccaagggaagatccttgtccttcaaaaccttcctcatctgggttttaataagtatttaccaaggcggcatcctcatgtatggggccctggtgctcttcgagtctgagttcgtccacgtggtggccatctccttcaccgcactgatcctgaccgagctgctgatggtggcgctgaccgtccgcacgtggcactggctgatggtggtggccgagttcctcagcttaggctgctacgtgtcctcactcgcttttctcaatgaatattttggtataggcagagtgtcttttggagctttcttagatgttgcctttatcaccaccgtgaccttcctgtggaaagtgtcggcgatcaccgtggtcagctgcctcccgctgtatgtcctcaagtacctgaggcgcaagctctctcctcccagctactgcaagctggcctcctaaggggctgtgcacccccagcgggctggccccagcaccttctgcccttcccagcaccttgtgcccttgccagtgaacgcagggtttgccattgctaccaagcaagcaccacaagaaagggagggtacgccaggcgagcccagggcacagatgctgagacagcctctccttctcagtgcagggacgtcacccctgccaggcaagcccagggcacagatgccaggatggcttctccctctcagtgcgaggcttcacccctgccaggcaagcccagggcatagatgctgagacagcctctccctctcagtgcagggacgtcacccctgccaggcaagcccagggcacagaggccgggacggcctctccctctcagtgtgaggcttcacccatgctaggcaagcccagggcacagatgccgggatggcccctccctctcagtgcgggaacgtcacccctgccaggcaagcccagggcacagatgctgcgatggcctcttcctcttaagtgtggggcctcacccctgcttttctttctttttttgtattgtcaaaattgtatttccatattgaagcagcttgagtttctactgaaaatgagcccgaattatttcactattactgtaaagggttcatcttactctggcattctgagaattagactgaaagtttaatttctgcagttccctcatattcagattctttctttgatgttataacacaaagtcattcctactcaaatgtaataaaattgaggctccacggaggcccgtgtccacatcagctgcagctcccactcagacagacggcctgccccacagcctgccctttgctgaagataccctcgctttatacttgcatttcgcttttcagtaaaaacagtcaagttactgagttctcacataaaaaaaaaaaaaaaaaaaaaaa

SEQ ID NO: 222 - DNA, 5823 bp, Homo Sapiens
cccaagctaacctccccaccccaataggatctggtggaagaaaagtcaggcaaacacaagcacgcacacaccactgggagatcagatcttctagctggctctctgctgccacagctccgccgaagggagggggtggaagaggaggactaaactcagagctgagaggagaggcaggtgcatcacctggatcatgaggtcacccctctgctggctcctcccacttctcatcttggcctcagtggcccaaggccagccaacaagacgaccaagacccgggactgggcccgggcgcagacccaggcccaggcccaggcccacacccagctttcctcagcctgatgaaccagcagagccaacagacctgcctcctcccctccctccaggccctccatctatcttccctgactgtccccgcgaatgctactgcccccctgatttcccatctgccctctactgtgatagccgcaacctgcgaaaggtccctgtcatcccgccccgcatccattacctctatctccagaacaacttcatcactgagctcccggtggagtccttccagaatgccacaggcctgcgatggattaacctggacaacaaccgaatccgcaagatagaccagagggtgctggagaaactgcccggcctggtgttcctctacatggagaagaaccagttggaagaggtcccctcggccctgccccggaacctggagcagctgaggctgagccagaaccacatctccagaatcccgcctggtgtcttcagcaagctggagaacctgctgctcctggatctccagcacaacaggctgagcgacggcgtcttcaagcccgacaccttccatggcctcaagaacctcatgcagctcaacctggcccacaacatcctgagaaagatgccgcccagggtccccaccgccattcaccagctctacctggacagtaacaagattgagaccatccctaacggatacttcaagagctttcccaatcttgccttcattcggcttaactacaacaagctgacagacaggggactccccaagaactcctttaatatctccaacctgcttgtgctccacctgtcccacaacaggatcagcagtgtgcccgccatcaacaacaggctggaacacctgtacctcaacaacaatagcatcgagaaaatcaacggaacccagatttgccccaacgacctagtggcgttccatgacttctcctcggacctggagaacgtgccacacctgcgctacctgcggctggatggaaactacttgaagccgcccatcccgctggacctcatgatgtgcttccgcctcctgcagtccgtggtcatctaggccctactccgccaccggatctgctctgaccgcacttgaaggctggggcccaggcacctgtgccggccattcgttttctctctctccctttctttctcccagctttgcctcccttatcccaccctcgaggcagggaaaagccatctattcttctgcagcctcaggagcgagacttcaaggactcagtttggttccacccagttgaaagacacccagtgcacacccaaactcctggccttctgtggtttccctttgctccagaaacacagatgtgtctaaagacttggtgtccccttctctctcctcccccacccgccactcctgggtacatctgggccgtggactatctgatcttggtcctggccgagcaaacagcccggaggtaaggttcagaaagtccccctggggactcctccatcttcggcagctctggctcaaagaggccgagaaacccagttctcctgggccaaggatcccttctggcaaagctgctgctccgccgcttggttccccggcaccagacatcgccctggccctgctggcccgggtatcgggaaggaggagcgagggaatgacggaggtagggtgcagggtcagggctcccgcaggggcctgcatctggccagcaggacacagggatgcgcagggcgcccccttctgttccagggtgaacatagcacacgccctcctggctgggcctcaggaggaacagccaaggagaagaatggcccaaggaactaggaagcagccatgggagaggggaagggttcaagcccgggatgggcccgcgtgacgtcgatgggtcctgcggcccccttgcccaacctcgggtttagggaggagggttcacagtgtttttgtgggggcgggggaaggaagaggcagccccgcccccgccatctgttctccatcagtgtgcgcggcccagccatttccaccctcgggaggcggctcctgagaaacagggaggaaggggcggagcacctggacgtctcccagaagcccctccacgtttgaaaatgcgcctcctcctcggagacagacgcatcggtgccacctagtggctggtgggagtaacagctggtcccagtcttgcgcctggccctcttcctggggtgattttcctcggtggaggaggcccgtggggtcccaacacggaagagccatgggccgtgtgcatggtgtcgctctcctctagggtctagcgggcacaaacgtccccaggctgggctcattcccatcgtgagtgagcccaggtgaggacatagtcggctcccgtttgttgtaggcccttcccaggtgccttctcagctccctcatctgtaaaccgaggaggtggataagatgctcccggccgggcgcggtggctcacgcctgtaatcccagcactttgggaggccgaggcgggcagattattgcctgagctcaggagttcgaaaccaccctgggcaacatggtgaaacccccgtctctactaaaatacaaaaaaattagccaggcatagtggcgcgcgcctataatcccagctactgggaggctgaggcgggagaatcgcttgagccggggaggcggaggttgcagtgaggcgagattgtgccactgcactccagcttgggcgacagagtgagactccgtctcaaaaaagaaaaaaaaaagatgctcctctgaggtccctccggcgctcatgttccgagtctgcagctccacactttaaatcatactcgaatgcaggacaagtcctaaatatttgccccttcccttgcagtaatttattttctgtatggactgtccctcccccagaggcttccccaccctccattgcctggcccaggtgagcagcttggcaggtctccaagtggaacccggtccagacagggctgcctcgacttcacctttccccctaacttcctccaagggatgctgccccttctcagccccctgcgtgtgtatattggtgggaggcatagaggatggatgttctagaaatgagtaagacacagtgcccacccccaagttaggatgaaaaaagttccagaggtttttaagaaattggattaagctgggtccctaacttcaagaaattcccattatgctccttctcacctttcttttttgctaattatggaaaatagggcccatttcatcatagcctccttcccccgtgctccactacaatcgccgcattctttctagctgcagctggtttcttcaaggctcctgcttaaagtccacacgttattatggccgaaagcaacctggtgcttcggcctggataagagccccttctgcatcttattcacagcttgcagcctcagcccctttgatgaggccctcaggggagaggtcattaccttgatcctgcaaacccagactcgttgagcagcaacgcaatcaccatcatcccactgcccaatctagaatatgtctgctctcctttgctctctgcagctgtaagccagaggggattcaaggtaaataggctttacaggctcccctcctccaaacacacacagaatgggctggtttctttcaagtttaaaaaaagcccccttctccatgcacaagttcattccctccatgctgtcgtcatcgacatatacaggtgtgtacgtaggtgtatgtgtgtactctgcacgtatatctcttctgtcttgaagaccctgttaactttgtgaaataacttccacatttcaacacacttcacagtacaggaaataaagtaatatgaaaaacaccctgcgtgaactcaacggtgtgaacaggtcaagaataacacttcaaagtcatcttgccagccaggcgtggtggatcacgcctgtaatcccagcactctgggaggccaaagcgggcagatcacctgaggtcaggagttcaagaccagcctggccaacatagtgaaaccccttgtttactcaaaatacaaaaattggctgggtgcggtggtacatgcctgtagtcccagctacttgggaggctgaggcaggagaattgcttgaaccctggaggcagaagttgcagtgagccgagatcgcaccactgcactccagcctaggagacaaaacgagacttcatttaaaaaaaataaaaataaaaataaaaataaagtcatcttgccacccaccccctaccattgagccaccatgcccagccccaaagcctcttaattgctctaacaagatgagtggggaaaagattatactcttaagaaattcctacgaaagctatccaaaagccttttctttcctcttttcttattatttttaaatagaggcagggtctcattatgttgcccaggctggtctggaactcctggcctcaagtgatcctcccaccttggcctccccagagtgctgggattacacacgtgagtcaccatgcccagccccaaagccatttcttgaagaatttctcgcaaactcacaaccctcatgaaaaattaatcctcagttccacgagactgcccacccacagacaaaaaaatatatatattcctaaagtcggaccagaaatctgacagctgcctttgaaacccaaagcctcgggttctttcaagctacatgtactaaattgtcgaaggtctcccaggagctctgtactgaggcagacacagaaagacacaaaacggtcgtctttcctgcccaagtaaagcttacagactaactggggagatgtagtgtgcatacaaaacagtaaaagagccatctcaaggacagagagcatagaccaagtcatctggaatggtctacatgccatgcggaagtccaccgaagggttagaacagggtgtcccagactctctcttctgagggaaggttggttgcaaaagtgggattcatgaccctcccaggctacaccatcttctttagaatgagaactgccaggtgacgccctcgctgctcctacctggctactaaacatcgacttcggttcacttcacggatgttcagtggatatcggtcacatgccaggtccccagctacgcattcaaggatggataatatacatagcagcacatccttgaggaactcataccttggtaaagggaaagaaatccatgaatggatacctctgtgtcctaagtgtttgtaataatgctgtgtgtcaggcctctgagcccaagctaagccatcatatcccctgtgacctgcatgtgcacatccagacggctggttcctaccttaactgatgatattccaccacaaaagaagtgaaaatggctggtccctgccttaactgatgacattaccttgtgaaattccttctcctggctcatcctggctcaaaagctcccccactgaacaccttgcaacccccacccctggccaccagagaacaaccccctttgactgtaattttccattacctacccacatcttataaaatggccccatccctatctcccttcgctgactcttttcggactcagcccgcctgcacccaggtgaaataaacagccttgttgctcacacaaaaaaaaaaaaaaaa

SEQ ID NO: 223 - DNA, 3197 bp, Homo Sapiens
gcggggcggcggcgggcaggggcggcgagtgcgcgggcgctcgccgccgcccttctcggcgggcagcgcgcgaggaccaggccgaggaggaagtggcggcggcggcggcgggactgcgcgccccagctccgatccccgttccgcgtccccgccgccgggaggaggtgcccactcgctcgcggcgcgcgccggccgccagactcggcctgtgggcgatttcctccggacccaggctccccgcccgaggaggaagatgcagacctttctgaaagggaagagagttggctactggctgagcgagaagaaaatcaagaagctgaatttccaggccttcgccgagctgtgcaggaagcgagggatggaggttgtgcagctgaaccttagccggccgatcgaggagcagggccccctggacgtcatcatccacaagctgactgacgtcatccttgaagccgaccagaatgatagccagtccctggagctggtgcacaggttccaggagtacatcgatgcccaccctgagaccatcgtcctggacccgctccctgccatcagaaccctgcttgaccgctccaagtcctatgagctcatccggaagattgaggcctacatggaagacgacaggatctgctcgccacccttcatggagctcacgagcctgtgcggggatgacaccatgcggctgctggagaagaacggcttgactttcccattcatttgcaaaaccagagtggctcatggcaccaactctcacgagatggctatcgtgttcaaccaggagggcctgaacgccatccagccaccctgcgtggtccagaatttcatcaaccacaacgccgtcctgtacaaggtgttcgtggttggcgagtcctacaccgtggtccagaggccctcactcaagaacttctccgcaggcacatcagaccgtgagtccatcttcttcaacagccacaacgtgtcaaagccggagtcgtcatcggtcctgacggagctggacaagatcgagggcgtgttcgagcggccgagcgacgaggtcatccgggagctctcccgggccctgcggcaggcactgggcgtgtcactcttcggcatcgacatcatcatcaacaaccagacagggcagcacgccgtcattgacatcaatgccttcccaggctacgagggcgtgagcgagttcttcacagacctcctgaaccacatcgccactgtcctgcagggccagagcacagccatggcagccacaggggacgtggccctgctgaggcacagcaagcttctggccgagccggcgggcggcctggtgggcgagcggacatgcagcgccagccccggctgctgcggcagcatgatgggccaggacgcgccctggaaggctgaggccgacgcgggcggcaccgccaagctgccgcaccagagactcggctgcaacgccggcgtgtcgcccagcttccagcagcattgtgtggcctccctggccaccaaggcctcctcccagtagccacggagccgggacccagaggggcagcgcagggcgcagagcacacccgctgggccagcagctcccaacggcgatgctactactaagaatccccagtgatctgattcttctgttttttaatttttaacctgattctctgatgtcatgatctaaatgaggggtagtgggggatggaagagagtaccaggtggtccaccgttggggagtggggccgtccgcctgctctctactgtgcagacctcctaactgagtttacacacgcttgtgtttgcaacactaggtctggatgggaggtgaggggtgtgcgtatggctgccatgccagtgtctgtgcacatccctgtctgttggtctccatggccactgtggaccgggacccttgggggaagcctgcccatgtcgggctgtgggaggctgatcggtgcatgtgagagtggcttcccttctgcctgactccccactccctgacctgccccttccttgtttttcctcctactggtctccaccaaggctttgttagcccccaccctgcctggtgtgcagctaacccctccctccccacagccagaggaggccacagacccctcaggggagttccgcgctggggtctgggctgtgctccctcactaaagggaaggaaaggaagctgggcgtcctctgggccccccaacacacgtcccatttagccctgcacagcggtctccttcccctaagccagcactgctgctccctggagcccgggaaggaggctgcctggctggaggcccgagccgatggcgcctgtgctgaggatttgtgctgtgatttgggcaaatcattccaggtctttgggcctccacccccttgtctctagtggacatttgagatcagagagcaccacagggctggctttgtgccctaacccctgggatgcagcctgcctttccataaagtcacctaggtgaggataggcgcgggagcctcggcatgacaccatggagatcggggccctcttcccagtgggttcactccttttcacacctgctgggtccctcctcacccagcaggcctggtccacctctcattgcaagccccaagcactgagccagcaggtgccagggagccacccgccccccatcgcttctgcacacctcagactcaccccatcaccttggcagcaaagcactggctctgccgtctgacccctgatccaggcagccccctctgcagagaaaagggttggggagaagcctctgcagtcctggaagatgtggggtgctgggtgagaggcatcagcccccacaagtatgtttttgtgtcttaagatagcagtttactttgaaaaagtgaaaaaggcttccgggctgtcctctgcccagtgagatggaggacgctagagaaagtgctgagtgtcccgagagaggcccccgagccagtgcatggaggtccttcggcctggctcagctgggctgcaggatgcccactttgaggagggaggcacagggcttgggcgaggggcagaggccatcagaactgcccggcttttttggaaactgaggacccaacaactaaccacgtttacacgacttgagttttgaaccccgattaatgtctgtacgtcacctttcctagttctgaccctgagccctggggaacaggaaagcgtggctggcctcttgcactgctttgtctccaaaataaactactgaaatcaaaccgca

SEQ ID NO: 224 - DNA, 5992 bp, Homo Sapiens
gcgtcccgggtccccgcgccgcgccgcgacctgcagaccccgccgccgcgctcgggcccgtctcccacgcccccgccgccccgcgcgcccaactccgccggccgccccgccccgccccgcgcgctccagacccccggggcggctgccgggagagatgctggaagaaacttcttaaatgaccgcgtctggctggccgtggagcctttctgggttggggagaggaaaggaaagtggaaaaaacctgagaacttcctgatctctctcgctgtgagacatgtctgagactcctgctcagtgtagcattaagcaggaacgaatttcatatacacctccagagagcccagtgccgagttacgcttcctcgacgccacttcatgttccagtgcctcgagcgctcaggatggaggaagactcgatccgcctgcctgcgcacctgcgcttgcagccaatttactggagcagggatgacgtagcccagtggctcaagtgggctgaaaatgagttttctttaaggccaattgacagcaacacgtttgaaatgaatggcaaagctctcctgctgctgaccaaagaggactttcgctatcgatctcctcattcaggtgatgtgctctatgaactccttcagcatattctgaagcagaggaaacctcggattcttttttcaccattcttccaccctggaaactctatacacacacagccggaggtcatactgcatcagaaccatgaagaagataactgtgtccagaggacccccaggccatccgtggataatgtgcaccataaccctcccaccattgaactgttgcaccgctccaggtcacctatcacgacaaatcaccggccttctcctgaccccgagcagcggcccctccggtcccccctggacaacatgatccgccgcctctccccggctgagagagctcagggacccaggccgcaccaggagaacaaccaccaggagtcctaccctctgtcagtgtctcccatggagaataatcactgcccagcgtcctccgagtcccacccgaagccatccagcccccggcaggagagcacacgcgtgatccagctgatgcccagccccatcatgcaccctctgatcctgaacccccggcactccgtggatttcaaacagtccaggctctccgaggacgggctgcatagggaagggaagcccatcaacctctctcatcgggaagacctggcttacatgaaccacatcatggtctctgtctccccgcctgaagagcacgccatgcccattgggagaatagcagactgtagactgctttgggattacgtctatcagttgctttctgacagccggtacgaaaacttcatccgatgggaggacaaagaatccaaaatattccggatagtggatcccaacggactggctcgactgtggggaaaccataagaacagaacaaacatgacctatgagaaaatgtccagagccctgcgccactactacaaactaaacattatcaggaaggagccaggacaaaggcttttgttcaggtttatgaaaaccccagatgaaatcatgagtggccgaacagaccgtctggagcacctagagtcccaggagctggatgaacaaatataccaagaagatgaatgctgaaggaaccaacagtccacctcagcgggccagcagcccagggaacccctgcccaccaggattgctggaagtgtgacggagcaggcgggctgaggagagtggaaaaggaagcgacccagaaatggcagggacacttctcttgcagaccaagagggaccctggagcaccttagacaaactacccagcacaggcggggctggaattctggcggagggcatgagcctgggactccatgtcacgtttccttctgatttggaatctctccatctgtaattcctcaccctcacccttccaccgttgttagtatcatggtgtttttgtttttgtttttgttttaagaacctgcagtttgactcttcatcgttcatctaggggaagacatctgatgttgttttcctatggaaatatatatctattatatatatattttttgcaaatctcacaaagtgcggcaagcccagctggtcaggaaagagaatacttgcagaggggttcaggttcctctttttcctgccacgtggatcaggtctgttcctgttactgttgggtcttggctgaaaaaaaaaaatgcttttaaaaaagataaaatgaaaaggagagctctctttttctctctcttgctctgttcttcccttggtcccctctgtcctcccgccctgcctgcagttgagattcagatgccttctgacagagttcagcctcttggagagtcttggggattgttggcacctaaacagaatcagtgacccgggtgctttgtggccagcagcacagaatcaaacccgcatcccagcattgggccacccatctgagggaggccaaaatcatcacagatgctgctgtgctgcagacagatacatgctagtccagagagccgcccctgagatggctgtgagaaccatgtgtctaaggcgtaagataaggatggaaggctgtccaagttatttggaaggcctcggcagcttgggattagcttgggagcgcagcgctgcaaagtggaaaatatgaaaagaccacacaggcccagcagtccagaaactgggcaaaaatattctgcagtggggatttatttttccaaagcaggtaacagaggctagtgagaaagaaaagctcctctctgctccattccaaaggccatcttgtggtcagtttcatgccctcacctgatttttttttttttttttttttttcaattcctaaccttttttaaagtttcctggtctccactggacacagagctttggagacggaggatcccagagggcagtctcagttgcaatcagtgtgtgcccagcctgggcagacaggaaattcctcggatacattattttttctttctttcatagctgtgtctcagaaaggacccatttgtggctctttttcacctcaaaataagatcgatggtatcttgtaaaatgagggtagtgccacttcttagtatttttgaaagctgttttagattttttttttttttccttttctagccatctaaattgactcttccaatataggtctcagaaatccaatatttggagtacaatttcttttaatccagattacacctgccttacaaagcaccccctccttgttcccctctgtttcctctactcagttgggggagaaactcacagctcctccgggatacatatgtgccctcagcagcagctcccaggtgaagttaccagacccctgggcttctccccagctttttctgagttgagtcagacatgtagagtttgggtcacacaggcaagaggaattttccctcggccttactgacaaggacaccaacctagggtgcaaacagatggactatggttcaaggacactggaattgaggagctgatcaaggctctcttcagccttgctctgtccctgcctcttatcagagcacaggtagacacacgggcatagccagcccactcctactgtcacaggcgccccaccattcaaccttccgggaggtcagggaccttctatatgaggcgagtgggtctcagtctgcttgaatggtgatgagattctgctggatctcagcacgctgcaggtgtcttttgagagcattcagtaggacatggtgatccctatttcagcctctaagatgactggtattctatctgaaatgcagagattaagccaaatacctgatgtattgtgaaagccactgattttaagaatggagagaaagggattttttactgcatccctctgtatgaatatgaaatcagagaccagggcatgatgttgctaggattagagcctctcagtctggcctcttcacccaagtgcaagaactcagtctcttactgttcaaagaatcttaacagttgaattatggagggaaattcccttttgccccaagcatttctatatttaaagcaatatcccaggagaatatgttagacttaggatgataccttcagccacttgaagaagaaatagaaggcgctcattccaatatagtctttatttcccattcagatacaggttgagcatccctaatctgaacagttaaaacccccaaatgccccaaaatccaaaccttcctgaacgctatgacaccatgagtggaaaattccacacctaacaaacacatttgctttcttatggttcaatgtacacaaactgttttatatagaaaatgatttcaaatatcataaaattaccttcaggctatgtgtataaagtatatatgagccataaatgaattttgtgtttagactttgtgtccatccccaagatctctcattttatatatatatatatatatatatatatatatatatatatatatatatacacacacacacacatacacaaatattccaggatacaaaaaaaaacatttaaaaatccgagacccagaacacttctggtcccaagcatttcagataagggatatcaatctgtactaccaataaggatttcgtaattcccctaactgcaaatgtcctcttcatttgttctttatgagaaaacccgggtagtgccagcacctggatacagtatttacaccctgcagaccctaaagatttcagattcagttagcaaaccttgatgaagcacctgctggacactgagggacccaaagctcaatcagccataatccctgctttcagagtttatattgtacctgcctaatccacccggcgtgactcatttcaacactaagtactaggggtgttgtcaggagacaaatctgaagtcaggagaggaaaatgcaaaggagccctgccgtgtgatggatgtgcattctcacttgggtcttgaagttctcattcctacatctcaagctagccaggcagtctcctctctatcagaagaaagcactggtaattggctagactggctatgttgaaggtaacatgaactctaagatcttgacccagggcgacttggttttgcttaaggtggcatcaccaatgttccaaatcctttagggagatgagggtatccccacagaaaaagaggaataatagaccaatggattttctcctttcaccagtatgtttggaaccctctgatccaatgtcctttgatactgatctcttgtccaaatgagaatgtcgctttagctgaaattcaaatggctgtgacaatttaccgaaatgatgaagtaaccaccattcccacctttcactgcctaggctccaagtctgaatacatttttgaaataggaactcccttttgcaaaaaagaaacctgggtgtcagggaggtgaagtgacttgccctaggagcagacagcatgccaagaatggaattaggctcaggatccagcctgggctcaccctgtgtggctcattcccacccaggaaactgaagataaaagatttgggaaaacacaccaagaaaaaggggcagttttctttgcccaagcatttggtgctagttagaggctgttcactctctcctgctcctcttcggagtagaaataaaggctgtgacacaaggaagccagtggggtgggagggaggcaccataatccctccctaaaacccacagaagactaacctgatactcttttgacccaactgcatcaacactaaacagctgcagaccccctgaatctttcacacatgccaagtgaacattcttgatgatttctctttgtgaccgcaaccacctgcaaaccagaacgactctagaatttccttccccgcccccctttttgtttagtttctaatctcttgtttatgaggtgtggggtttataagggactgaatcaaatgaatgtaacaaaaaagaaaaaaaaaacaaaaaaaaatgccttttctcagggccagtgagttgcaaataatttttaaagaaaagcctataattacatcatctcaataaattttttataaaaaaaaaaaaaaaa

SEQ ID NO: 225 - DNA, 2647 bp, Homo Sapiens
gagataagcggcctctaggcgccgggccctcagtctctcccagcgaccgccgcgggggcaaggcctggagctgtggttcgaatttgtgcaggcagcgggtgctggcttttagggtccgccgcctctctgcctaatgagctgcaccagaatgatccaggttttagatccacgtcctttgacaagttcggtcatgcccgtggatgtggccatgaggctttgcttggcacattcaccacctgtgaagagtttcctgggcccgtacgatgaatttcaacgacgacattttgtgaataaattaaagcccctgaaatcatgtctcaatataaaacacaaagccaaatcacagaatgactggaagtgctcacacaaccaagccaagaagcgcgttgtgtttgctgactccaagggcctctctctcactgcgatccatgtcttctccgacctcccagaagaaccagcgtgggatctgcagtttgatctcttggaccttaatgatatctcctctgccttaaaacaccacgaggagaaaaacttgattttagatttccctcagccttcaaccgattacttaagtttccggagccactttcagaagaactttgtctgtctggagaactgctcgttgcaagagcgaacagtgacagggactgttaaagtcaaaaatgtgagttttgagaagaaagttcagatccgtatcactttcgattcttggaaaaactacactgacgtagactgtgtctatatgaaaaatgtgtatggtggcacagatagtgataccttctcatttgccattgacttaccccctgtcattccaactgagcagaaaattgagttctgcatttcttaccatgctaatgggcaagtcttttgggacaacaatgatggtcagaattatagaattgttcatgttcaatggaagcctgatggggtgcagacacagatggcaccccaggactgtgcattccaccagacgtctcctaagacagagttagagtcaacaatctttggcagtccgaggctggctagtgggctcttcccagagtggcagagctgggggagaatggagaacttggcctcttatcgatgaattaagcaacaatgtaactggtcttgacttgtcatattcccccatgcaatcctaggtctgtattgctcaattttaggaagcctttgctactccatcagtaggtttagatttgagcttttgagacctggctatggaaaagaaagacacttgagaatttagtgttggggtctgtacagatgatgctacccaatttggctttgaaggatcaagtaacaggttgaaaactatttttataaaggtaatactttttcagttcccttcttccttccctctcaatccactagctttcatgttgggcaaggaaaagttgaggaaggatggctgatggtgatggaaagctgtgttaatggtatgaggaatgtgtgaaaagtatacacaaagggctctgaagctcaagtcagaggagtgggaggtctgatcattgttggtggaaaaacgtaaggttattttgtgcttttaagttggttttacaattctttcctggggaaattatttctggaggggaaaaagatccattctacgtatccttgtggagaaaagctaaataacctttaagaatgtgggtggtattggagaaagaagatgaattatagctccggagaatcaagatcttaagtgaagcctttctgttcagatgtgatctataaataatcataatttggggaaagtttaagcaaatctggctttgtagtcctgatgttataagtgactttgtgatcaaactgtcaggcttgggttcttgttatagaatgcttggtatagaaaaaccatgccatcattaatggctaacaacacgtagggacttcatgtcatgtcaaagatagctctttgcaagtgccttgattaaaccagaaaactgtcatcgtttaacccaaatatctgaatggtcatctggtaactcatgggtttttggcctcataagatggtccactctgtacacaggcattcctcctgcaataatgttgtatctttgagaccgttgtcagtgtacacaactcacatccttcatattgaaggtgactcatttttctgcacacttttttgatgtgatgcttgacgtgaggcccgacactaggattctcaatgcaagaatccagtaccttgcacatagaagtagcaacccatcccttgcctattttcatcttgctgttttcttttttttaaaaaaatggatgtgacttgttttgaatgttttgtattatacttgtttttgtgtgtgcataaattcattctgtaggatcttaagaaaaagagtcccagaatgttgcttctattattgtgcacaaccattgagaggtgttacaagaatgcagttaattttaacatgtgtgatgtgccatggtggaaaagtactatcggaataactctgcagtgacagaatttgaagtttggctagcatccatacttttctactgtaaatatttcactctcctctagctatccttgatgagcttctcactttaagaataaatgtgtttgatataaaaaaaaaaaaaaaaaaaaaaaaaaaaaaaaaaaaaaaaaaaaaaaaaaaaaaaaaaaaaaaaaaaaaaaaaaaaa

SEQ ID NO: 226 - DNA, 3218 bp, Homo Sapiens
aaaatagtgaaggatgcttagactacttaacatacaaactgctttctggttaatcatctttagaagactggatttctggatatctactccactccatctctattgacttttaaaacatgataatgcaaacctataacactggcaaccatcagtgaacctttaatttcattgattaatagcgtttgaagcttcctcagggaataacaatgacatcagcagtggttgacagtggaggtactattttggagctttccagcaatggagtagaaaatcaagaggaaagtgaaaaggtttctgaatatccagcagtgattgtggagccagttccaagtgccagattagagcagggctatgcagcccaggttctggtttatgatgatgagacttatatgatgcaagatgtggcagaagaacaagaagttgagaccgagaatgtggaaacagtggaagcatcagttcacagcagtaatgcacactgtacagataagacaattgaagctgctgaagccctgcttcatatggaatctcctacctgcttgagggattcaagaagtcctgaattcatccatgctgctatgaggccagatgtcattacagaaactgtagtggaggtgtcaactgaagagtctgaacccatggatacctctcctattccaacatcaccagatagccatgaaccaatgaaaaagaaaaaagttggccgtaaaccaaagacccagcaatcaccaatttccaatgggtctcctgagttaggtataaagaagaaaccaagagaaggaaaaggaaacacaacctatttgtgggagtttcttttagatctacttcaagataaaaatacttgtcccaggtatattaaatggactcagagagaaaaaggcatattcaagctggtggattcaaaggctgtctctaagctttggggaaagcataagaacaaaccagacatgaactatgaaaccatgggacgagctttgagatactactaccaaaggggaattcttgcaaaggttgaaggacagaggcttgtatatcagttcaaggatatgccgaaaaacatagtggtcatagatgatgacaaaagtgaaacctgtaatgaagatttagcaggaactactgatgaaaaatcattagaacgagtgtcactgtctgcagaaagtctcctgaaagcagcatcctctgttcgcagtggaaaaaattcatcccctataaactgctccagagcagagaagggtgtagctagagttgtgaatatcacttcccctgggcacgatgcttcatccaggtctcctactaccactgcatctgtgtcagcaacagcagctccaaggacagttcgtgtggcaatgcaggtacctgttgtaatgacatcattgggtcagaaaatttcaactgtggcagttcagtcagttaatgcaggtgcaccattaataaccagcactagtccaacaacagcgacctctccaaaggtagtcattcagacaatccctactgtgatgccagcttctactgaaaatggagacaaaatcaccatgcagcctgccaaaattattaccatcccagctacacagcttgcacagtgtcaactgcagacaaagtcaaatctgactggatcaggaagcattaacattgttggaaccccattggctgtgagagcacttacccctgtttcaatagcccatggtacacctgtaatgagactatcaatgcctactcagcaggcatctggccagactcctcctcgagttatcagtgcagtcataaaggggccagaggttaaatcggaagcagtggcaaaaaagcaagaacatgatgtgaaaactttgcagctagtagaagaaaaaccagcagatggaaataagacagtgacccacgtagtggttgtcagtgcgccttcagctattgcccttcctgtaactatgaaaacagaaggactagtgacatgtgagaaataaaatagcagctccaccatggacttcaggctgttagtggcagtactgacataaacatttgcaagggaagtcatcaagaaaagtcaaagaagactttaaaacatttttaatgcatatacaaaaacaatcagacttactggaaataaattacctatcccatgtttcagtgggaaatgaactacatattgagatgctgacagaaaactgcctcttacagtaggaaacaactgaacccatcaataagaaaaaggatcgaaagggaccaagcagctcactacgatatcaagttacactaagacttggaacactaacattctgtaagaggttatatagttttcagtgggaggggttgggatgggtaatctcattgttacatatagcaatttttgatgcattttatatgcataccagcaattattactgtgttcgcacagttctcacttaactggtgctatgtgaagactctgctaatataggtattttagaatgtgaattgaagaatggatcccaaaaacttcagaaagaggatagcaaaaaaagatctagtgcgattttatatatatatatatatatatatacatacatatatatatatcatatagcttaagctgatttaaaacaaaggccttagactaattttcgattttctttcttgaaataagctaatggcttgtttgtgtaaagcttttttattaaaagaaaaattttaaaaatcttgtacctagcacagtattgttatagaatatacatgtaacattttatatggtagtttaagtctgtcagtttcttaattgtggacaaattaacagttggctctggccttttgctgtaacatgcctgtgtcactcacttagccttggcatttgtgcagacataccattttcagttctgctgtcacttggaagttcaggctcagcatgaatttttggcaggtagctctaatacctggagttttctttgtttttttttcttttttttagttgaagtttatgagggaaataccagtgttcagttttgaactataatagtttgtatattcaacatttgaagtatattctattttgttgtactcttgtttcaaagtgtattcaagtaggttttctgaaatatagaaatgaaatttatcttctgttttggtctctggtgatattttaaacaatatttaaaagtcagtatagaagtgttttagttaggaagtgataaaacatctctcttctccttcccaactactgcatgaagaaattctacttccattatattaatatttgg

SEQ ID NO: 227 - DNA, 2741 bp, Homo Sapiens
atgatctcaggagatgtgtatgggttcagcttgacaaggggtggacttaccatggttaatactgagtgtcaacttgattggattaaagatgcaaagtattgatcctgggtgtgtctgtgagggtgttgccaaagaagattaacatttgggtcagcgggctggagaaggcagacccacccttaatctggtgggcaccatctaatcagctgccagcgaatatacagcaggaagaaaaaggtgaaaaggcaagactggcctagcctcccagcctacatctttctcccatgctggatgcttcctgcccttgaacatcagactccaagttcttcagttttgagacttggactggctctccttgctcctcaagcttgcagacagcctattgtgggaccttgtgatcatgttttagcacctcttacgaatgagtgtctgagcagccaaaaaataaataatgaatcatccaggcaaaggggaagaaaaatggacttggccagagatggggaagaacgtacgcaaaaagatgaggtcgttcagattggaagttggattggagggcggaccaaaggagaagctgctgaagtagatgttaaagatggagagaagtggacggcagagacatagaggaggaaaagtcagcaagacccgagatgtgtatggagagttagagtgtgggaagtgtgacatgtaactgaatcggatgatggcaactttcactgggcagtgaaaggtcaggttggtggtaaaagtcatgagttgactttggggcatcttgatatagtcacttccaatatcatgtgtttcaacaagcccgtgttccttcctggtcagttcccccagctagagtgtgttttacatcccgcagcattgtatgagaactgctagaatatcactcaccacttcccatagagattctgtttgttcatctgcttgtcccactgtgtgccttacacatagtaggtgctcttggaatgtgtgtgagatggattaacatgagaagtgcttctctgcatgatttcaccattgaagtgttgaaagcaactagcactcctccttcctgacctccaggcttccacccagctgtggggactgctgtggtggaagggcctagtctgaatctggacaggggaggtgcctgcaaatattttcgtgcctgcaaatatttttgtgcctcgggacagatggatgtccagtttactgtctgcttcctcagtggttctagaggtaattgcatcctgctgtgtacagttaggtcgtggaggagacaggcaccttctctcgtctttctggaaggtaaccagaggtctttcccctttcctatcatggcagctgctcagtcgcaggctccagatgtctgcttcagaattcaagaacaccttcctgagctgggaaacagatccaaggaaatatcagccagaggcttcattttatcatctgtggaaatgcaagatgttagagcacctaggagggtcttaacgtgcaaaacactgtcttgaggctgcctgcagaacagagggtcatctgctttcattagattctcaagggagcctcaacaggctacacctgaaccccaggtttggggcatctctccagccctcccagctctgacatcatcatcaccattaacagctgaaatgtgtgaggtggttgggatgtaccaacaaccctcccaagagtcccatatctacctgacctcatttgaccttcacagcaacccagtgactcagctgctatttggcccacgttttacaaacctgagtcagtgtgctttacctcagtgacccaagaacccaggtgctagagtcaggcctgcatccaaatcaggggtgggatcagtggtgtgccctgaacaaatcattatcctcttttttgttttattttttggagacagagtctcactctgtcacccaggctggagtgcagtggtacagtctcagctcacagcaaccactctctcctgggttcaagtgattctcctgtctcagcctcccaagtagctggggactacaggtgcgtgccaccacgctcagctaatttttgtgttttagtagagacagggtttcaccatgttgcctaggctggtctcgaactcctgagctcaggtgatccacctgccccggcctcccaaagcactaggattacaggcgtgagcaccccacccagctcattaccctcttttaacttcaattttctcatccacaaaatgagggcaataatctcctttcttccccactagccatgttcatgaaagtacttatttgcccattttaaaatatgtagcaatgtgccccagaaaggctggggcatgagtcctgcttggggtggagcagggaaggcctgctctgccccactggggtgtcctcagatgaaagtgggtgtgggctgactttctctgagctccctgtggagtcacacggggaactgggttgagtcacagcacaagggcactcacatgccccaccccgaggaggtccctgttctgacagaagccctgagccgtgactgtggactgacacccactgcctctgtgaccttgggtgggttacataacctcccacatgagaaggaggcggaggcacccgggcttgtggcctgagctaacctgggtagtgggagccctatctgtgaattgccaagggactgccatggggactggtgagaacacagctctgcaaggcccttttgatttgttttaacctttaacttttcaaaaatttcaaatttaaaggatgcatgacacagtt

SEQ ID NO: 228 - DNA, 932 bp, Homo Sapiens
tatttgacttcaactacaagagagatgccaagctgagaccagttaagccacagaactctttcagaaaagtcatattgttctcaaatgacctagcttttaccttcgttaactcaaacctgcacccatctgaagtgaaaccagcaaccatttaacagcaaacagtagcagcagcatgcaccaaaagagaatggaaagtgaaaagaacacaacagatcattttaaaagtagtgtgtcaattgcctggttctccactgacagctaaaattaaacaaaaaagtgaattccgttctacagtgtgaccatcttatgggaacactagaggatatccatagacagcagagaaaaaatagcaaaatagatattttgactcacagaaaatgaatgtttgcaaagattcaccaagaaataaagtcaaccaaaaaagcaaagtcatggaaaagaaatgcaaatctccacaaaaggcagcttttcagggctattcctgtctacacgccctctgaataaccatctcaaaatatgttcaagaagtatattttggaggtggcattgcagatgggatctcaaagccaagtctctacatatgatacaggcaaacagatgtttacatgacttgctcctccttgccttctgccatgattgtgaggcctctccagccacatggaatttttttcatccagtgactaccaaatggaggaattatcgtcttgaaggggaacgtatcaatcacttaaggaaactagatgggagactgaaggtggcaaaaggagaggcatagcaaatggaagaaggtgtcctagagtcactcttaaactttgagaagtttgagatattaggttggtgcaagagtaattgcaggttttaccattacttttaagagcacaaggaccaaacatatgaatatttacactaaaaaataaactagagttgcttca

SEQ ID NO: 229 - DNA, 4159 bp, Homo Sapiens
gtgcgcccttgcttcgtgccctcaacccgcatggcggagccgctggcgcgccgcggagaggccgggcgagtcgggcggtttcggcgcccgcgctgagccgcggaggaggggcggaggacgcccctgcagccggtgcgtctgccctcagtgaggcggggcgcgcggcggacgcccccgggcaggggcgggagtggtggaggcgccggcggttggcactgacaggggcggtgagcgagccgctccggtctccgggcgaggcttggccttccgagcagagacggcgggaagcggcggcggcagcggcggccctagggccggctggtgaggcgatggcggcgccggccccgggggctggggcagcctcgggcggcgctggctgtagcggcggcggcgcgggcgcgggcgcgggctcgggctctggggccgcgggggccgggggccggctgcccagccgggtgctggagttggtgttctcttacctggagctgtccgagctgcggagctgcgccctggtgtgcaagcactggtaccgctgcctgcacggcgatgagaacagcgaggtgtggcggagcctgtgcgcccgcagcctggcagaagaggctctgcgcacggacatcctgtgcaacctgcccagctacaaggccaagatacgtgcttttcaacatgccttcagcactaatgactgctccaggaatgtctacattaagaagaatggctttactttacatcgaaaccccattgctcagagcactgatggtgcaaggaccaagattggtttcagtgagggccgccatgcatgggaagtgtggtgggagggccctctgggcactgtggcagtgattggaattgccacaaaacgggcccccatgcagtgccaaggttatgtggcattgctgggcagtgatgaccagagctggggctggaatctggtggacaataatctactacataatggagaagtcaatggcagttttccacagtgcaacaacgcaccaaaatatcagataggagaaagaattcgagtcatcttggacatggaagataagactttagcttttgaacgtggatatgagttcctgggggttgcttttagaggacttccaaaggtctgcttatacccagcagtttctgctgtatatggcaacacagaagtgactttggtttaccttggaaaacctttggacggatgacagtggctttcttgtgatgacagacagaatggaggagagatctgcttatgggaagtagaaccatgaagtgactgtcacacatgcatgtccaagaaacatcctgaaaacacatgaagtcgtaaactggagaagcagctctacagcagagattatcttcgtgtttcctctttctactgggccagaaaaatcctcagggttgcagttggttgagtgggcagttgacatatgcatgttgcacccgatgttgtctctaagttagcaatgtgttatttccagctttaaaggtgagattgtagagatgctgtcaaagggataaggaaatagcaagatttttaagtagtgtgtttgtgaagactgatcccattttacaactgcctgttctttctccagtccttttttttccagccagcttgactattagaaaagtatgaaactggttgggttttatttaatatttttaatatattgagaagcatggtctgcctggactgcacttctctaaaagtgagatataaaattgtgcagctattttaaaagttgtatataatatgtgtgtaaaaaaaaaaaactgtaaaaaagaaaggacaaacaggttgttttgttctagttctaatttcttaaaaaccactacatggttacaaaattggaataacatttggggacaactgggttaactacaaagaagaggattttaagaggagatgtgttgtattgactcattttgtattatttttggcttacagttcccatagctgttagagtctggtttgtttttgtttttactctcaaaatcatagtaaagatctctcagtctcctggctaaagattgaaggaaggcaaatctatttctaattatacatatatcagtaaggatgatctcaacataatagtaatgtgtatcttttggtatccagttttatttttggccttctaagaaagtgtctcataacacagaacattgccatttgctcttgtaggcctcaaatatgaaagctattagtcatagagcctaggaaaaaaagaattgattaatggtccttttattttgtaaccttataaatgctgtagatattatcaaaaaaattttaatttcatattgtttacatcatgcaactaatctaagcctcaaactcgttattggggctataaagaaaacgtttacttacccagctgaaacaggttaagaatattcttaatctcattatagataattgcccccatgggacttgaaatacaacaccttgtgctgaaaacttcaggttggcaatatttgaaggtttcgttgtagaagagtttaacattaactcctattttgacttacaaatcttgtttctcatcactaaaatgcttttgaattaataatccaacccacatgagctgagagtttttcttttgttagaaaagaaacagacatctttctgtatgaaagtataaattgtatggttttagatacataagaattgacaaaagcgagcgaaatctttgtacttctgagttcttgctgtatgtatgttttgttttaaatctgattagggacacccagcagctggccgggattcttggattgctccttgggagttaagattgtcaatactcctgtgaagcaagggatttcagccatagaacaaagatttattgttgccacctgaaaagtttacaagtatttattgtgtatttgatacattgcttgaaaagatgaaatctgttaaagattcttttcgatgtccaggttaagaagaaacctccttgtattgagtgaaattatatgttaaatgtattagagaatgtaggtggtatagaaattgatttttcttggtgtagaacaactcagttcggcaaagtttaaaatttgattaaacaagagaagtggttcaggttgaagatggacttgttaggaagtgatcaagtcctttaagtacttgtttctttttcaggttgtgatgtggccattccgaattttgttgagagtttggtttataattgtctcttttgtcttgttagtaaacattcatttgcaacagttttgaaggtgctgagtggaaaaccgaaacacatggttattgcgtattggacctagaatgaaataattgcctcaatatttaacaacaagccattcttatctcaaagatttaaattcccgaatgtcccattcgcaaatcatatgcaattgaagtgagcagcatgagcatctgggtcatgagggccttcatttacgtaaatttgtcactaaaacccagtagtagctctacaaaatcttaaactgctgcagtgctcaaggagatggaatatctttgtcattggtgctgaggagagcatttcggtagaagacagttgcgcctgaagattgagtgtaaatcattcaaaccagtggttctcagtgttggctgtatacactttgtagtcactttggaatgttggaagacacatcgatgcttgggttccgtatgccaagattctgatgttggtctggaatatgagctggtcataaggatttttaaaaactttctggtcatttcaatatgctgccaaggttgagaaccactgttgtaaaattcaccttgagttttctcatctgcaaaatagaaaaaaaaaaatccttgctccctcccttcactacctcacaaggatattgagggtaaaggagaaaataatgggaaagtgcttgtgccgtggatgaaaagtgctattaaaagtcaaaggagtgttctgtttcaattcatagtatgatcagggaaagtgtaactgagtatactttgttgacttgggaaacctggagcactttctttggttggttaacgaagcatgcagatgtggaagcagacgttactattatccctactatggtcttctgtcatactgagacaggctgttttaattacctggttttacataggaaagaagaaatattaaggcttaaagtttgtaatgatcaatggctcataattcattaaatcttttcatacaaggaa

SEQ ID NO: 230 - DNA, 2646 bp, Homo Sapiens
cttggcaagtcgtcttataaaccaccaataatagcctcttaaaaattcaaaaattactcctcttggctaacaaaataaatgcaaattaatttaataattgttgaagaaattaaattttttaaaattaaaaaattgcaatgttgaaattctcaaccatgcttatccagaccttttcctatactactaactgccctgggcttatcttaaatacttctcagaagatttacttgttttacaccaggataggcaaagtatggcccacagtgtatttttggactgtctgcaagcacagttgctataatttttaaaaggctgaaaactttaaatttttgtaaatatgctcattaactgtttattaggcttcattaattttaaaatatacagagactatcctattcaactatatttgtatcctatttctaattctcctaacaattatatacactggcaaaaactcttcagatgatatataaggaaaaggtcaaatatactaccgaattcatccagctttccaaagatgctcaaaatctttctgtgtctctcactccctcccttaacccacataccacatctgaaaaaaaatgatatggtgtaacgatgccagtattctaaatgcttgaagggcttatcacatgccctttccaagctgtgacagaagcatgtcccttggaccccggcatcctgtcaatctcacctctgaaggtgacccagtctcatacttcactgaaacaaagaccattagacgccagcactcccgacttcttttatctccactttaacatttctccatatagtaatcctcacttttctactccctgtcatctcagaaaaggaattctctctcctcttttccacagttagcttctcaaatttgtgcctttaattctacccctcccaaatattccaagacttgctccactaattatttcctctcttggaatcttaatctcatcctcttcccttgatccctcccctcagcctttaaaactcctagaccttaaaacactctctgtgatctgacagcccttcaaaccaatatactccccatctctctcccctggttcaatggcaagatctttggccaactgctttctactcggaccttgctattatttgctactaggcacccacaaaccgttgcttgttaaactgatctccttcaagacttaagaaaagcgccatgcggctccctcccagggctctcctgccctctcctcaccgatgccaagagtggtcctgctggagaactgccgcgcctgcagttcgtgcaccttttcccgaagctgcgccaggaaattatggacgaactggaaggggccgagaagaagggtcttggcccccaactgtagctccaagcctttttgtgctttcagatttcggatcctccgcgtggagcaccttggggcgccccttggcaggttcccgccgcatagggccgacttttccacctctggctccagggcgggaagattgtagcggctttgagcttactacttgttttcttataatccctggcggagctgggtcaatttcaggcacagcccagctcagtcaggcgaggtccagaaaggcctgacttgcctggcagcctcaacggacttgtccccgcagcccttgcggacctcctggtcgtcatggcgactgtgaaatgtggggtggggagcatgcgttcgaagccatttgcgcgggcagtccctgcgtgtccccccacgtgctccccagcactcgcaggacccccgcctccgagcttccctgagcgtgcagcttccagtgagggcagccccacgcacagccccccacaccctccccaacgccttcagcccccggtgcgcgtagtccccaagcccacacgtgcactctccaccttgcggcagctgcacgtacagccccccacacgctcccagccccactggcgcagaacccatcaccgctcgcccttcacgcgcttcactgggagtgcagcccccaccccgagcgcgcagctccacgcagcctctccacactctccccagcgcctgcagcacccccagtgcgcacagctctgccagtcgcttccccgcgtgccgcccctgcaccacttcgggccataaccttgctggcgactaagtctgaagaacttcccgtgatttaattcttttcttcgagtttagtcttagctttgacattttaaccaaaaggttacacgttaatttatggtatgaggtcaccacttctcctattgtccttctcagtttctccccaacctctcctattccctattttataagacaggagaaaagggagaaagcaaaaagttagaaagaaacagaagtaagataaatagctggaggaccttggcaccaccacctggccctggtggctaaaataataataatattattaacccctgaccaaaactattggtgttatgtgtaaattccagacactgtatgagaaagtactgtaaaactttttgttctgttagctgatgtatgtagcccccagtcacgtttttcacgcttacttgatctattatgactttttcacgtagaccccttagagttgtaagcccttaaaaggcctaggaatttctttttcggggagctccgctcttaagacacgagtctgccgacgctcccggccgaataaaaaacctcttccttcttt

SEQ ID NO: 231 - DNA, 1036 bp, Homo Sapiens
ccgtctcctggcaaccagatgcaggggccatggcactcttaacaccccagggagtgaaagaagtcttccaacttcagagaccacaaggtcgggagcgcctgcggaggcttctgaactgggaggagtttgacgaacagagagactcccggaggagcatcctgctggacaccctctacgagagcatcatctttgcagtgggcaaaggcttcccatgggtggaggtggcccaggtggtcaagttcacagaagagctgctaagggaaaccaaaggctgctccattactgaggctgtgacgatcctggggaacaagcttagagattaccggggccatttcaacaccacccacctgctggccctctgtgactacttccaccacaccttcatccgccactacaaactctaccagtatgtcctgggccaggaccagcaggtcgacctgaccgttgcccacctggaggtgtgcatgccaccccatcccctcccgctggccgagggcatggacagggacttgtggatccacgagcagcaggtggccacactgacggaggccgaggcacagaagcgcgccgacgtgctgctcctgaaagaggcgctgcgcctggagcgggagaactcgctgcagaaggcgttcgctgccgccgcgcctgcgcagcccggccaggtcctggagagacaggagttggagagcctcatctgccaggcagtccacacccagatggagctcctgcaggagctgctgcagcgccagatccagaacacattcgccatcttggacctgaagcttcagaagaagactctgaacctcaacgcccccacccctatcccgccccccatcaccagccacgcaggccaggaggaagccctgaagccccaaagagcgagcaaaggaaagaaagcgaaggcaaggaagtagaaggtcccgactgccacacgagactgactggggaccagccacccataaccatgagccttgcggcacggtgagctcagcacccacagagagacttcttgtgattaaaagaaacaaacccatgc

SEQ ID NO: 232 - DNA, 2280 bp, Homo Sapiens
gagggcgcttccggcacagcggaactccgggtgccggttgaggttgctggtggacctgctctggtggtcttggatgaggccccatgagcgcggcgcccctggtgggctacagcagcagcggctccgaggatgagtccgaggacgggatgcggaccaggccgggggatgggagccaccgtcgtggccagagcccccttcccaggcagagatttccagtacctgacagtgtgctgaacatgttcccgggcaccgaggaggggcctgaagatgacagcacaaaacacgggggacgggtgcgcaccttcccccacgagcgaggcaactgggccacccacgtctatgtaccatatgaagccaaggaggagttcctggatctgcttgatgtgttgctgccccatgcccagacatatgtcccccggctggtaaggatgaaggtgttccacctcagcctgtcccagagtgtggttctgcgccaccactggatcctccccttcgtgcaggctctgaaagcccgtatgacctccttccacagattcttctttactgccaaccaggtaaagatttacaccaatcaagagaaaaccaggacctttattgggcttgaggtcacttcagggcatgcccagttcctggacctggtttcagaggtggacagagtcatggaggaattcaacctcaccactttctaccaggatccttctttccacctcagcctggcctggtgtgtgggtgatgcacgtctccagctggaggggcagtgcctgcaggaactacaggcaatcgtggatgggtttgaagatgctgaggtgctgctgcgcgtgcacactgagcaagtccgctgcaagtctgggaacaagttcttctcgatgcctttgaagtgagcaccagaggccttcctcctccagggccctctgcagaccaggctgagatggaggaacctgctaaaatcgatggagatgcttctagcctcccagtaggaggccccagccatgccttcaacctggcaggaggtgtagccactcctcatcctccctgagtgctgatattctctctctctctttctcttcctcttctttctctctcttctcctctctttctctcctctgtctctcttcctctcctctcttcctctcttctctcttcctctcctctctctcttcctcttctctctcttcccctcctgtctctcctcccctcctctcttcctctcctctctcttcctctcctctctctacccctcctgtctctcctcccctcctctctcttcctctcctctctctcttcctctcctctctcttcccttcctgtctctcttcccctcctctctctcttcctgtcctctatctcttcccctcctctatctcttcctctcctctctctcttcctctcctctctctctcttgctttcttctctctctcctgtctcggctgttgtgggttgcaggttgggtgctgctgttgtggtccttcccagaaactgccagtagagggcagcctgggcatcctaatgcttactctggttgttacacaaagaaaatattggggtcactggcgagcccacccacactcaccagaatctccactgtagtccccctaacaaacagcccttcacttcctctcccacttcagcaatttgtattttgatgccattggcctcagatcagagtgttttaaatcatcacgccctggcttatccctggtcgagccaggacacggggtgcttcagtgggtctgtcaccctctctccttgaagcatgttgcttttatttatttacttttactctcaccctgctcctgtaccagcaggggccacttcaaagccaaggtacagggtgataacttgtggtccagcatcagttttctccacttctttctcccactcacccccagcaaggtgcctggggagacttgagcagatgtttcattttggcctggccagtggctgaaagccaggcctccaatgcactgtgacctctggcttccccagcagctttcccagagaggcagaggggccttccacagcccgggttctcctgctgcctcctgcctgctgcagctgcaggcattctgaggggcaacgtggaggaagggccagggatgcatgggattttaattgtttcatcacaccttccccgtggcaaagaaacagtcagtcctcttcaggtgtcttctggatttctggtgatggacagagaaatctttttacagtttcaaattatgttcaacaaataaaaattgcattttttattttggaaaaaaaaaaaaaaaaaaaaaaaaaaa

SEQ ID NO: 233 - DNA, 2219 bp, Homo Sapiens
ggcaggtgttgaggggctcccggtccggctgccgccgctcccccgctccggacccggggctccccctagcgccgctgaggagccgcctctgcggctccaggagggcgcaggagcgggactgagagcgcctggaggctcgagcggagggtaattcatttgcacacctgttagcaagaaacagaagttgaaggactggaacaagtgaactaggaaagagggaacgccaatccaaggatagaaggacaaggacagaatcaccagcactggctgaaggcctcctgtttcctgcgctttctccttttcctgtgaaatctccgaggagaagaaagaatgatggacagtttatcctttcactgccacaaggcctgtttacttggcagtaggtccttaagttccttgcttttttgctgctgtttggtgactggaagaggcaccagagactctcactctggggaggtttgctggcatgggtaatctcattaaggtgctaaccagggacatagaccacaatgcagcacattttttcttggactttgaaagtaccttaacatggggaatcttcttaaagttttgacatgcacagaccttgagcaggggccaaattttttccttgattttgaaaatgcccagcctacagagtctgagaaggaaatttataatcaggtgaatgtagtattaaaagatgcagaaggcatcttggaggacttgcagtcatacagaggagctggccacgaaatacgagaggcaatccagcatccagcagatgagaagttgcaagagaaggcatggggtgcagttgttccactagtaggcaaattaaagaaattttacgaattttctcagaggttagaagcagcattaagaggtcttctgggagccttaacaagtaccccatattctcccacccagcatctagagcgagagcaggctcttgctaaacagtttgcagaaattcttcatttcacactccggtttgatgaactcaagatgacaaatcctgccatacagaatgatttcagctattatagaagaacattgagtcgtatgaggattaacaatgtaccggcagaaggagaaaatgaagtaaataatgaattggcaaatcgaatgtctttgttttatgctgaggcaactccaatgctgaaaaccttgagtgatgccacaacaaaatttgtatcagagaataaaaatttaccaatagaaaataccacagattgtttaagcacaatggctagtgtatgcagagtcatgctggaaacaccggaatacagaagcagatttacaaatgaagagacagtgtcattctgcttgagggtaatggtgggtgtcataatactctatgaccacgtacatccagtgggagcatttgctaaaacttccaaaattgatatgaaaggttgtatcaaagttcttaaggaccaacctcctaatagtgtggaaggtcttctaaatgctctcaggtacacaacaaaacatttgaatgatgagactacctccaagcaaattaaatccatgctgcaataacaattctggaataagcacctgctgtagacagaagacagtattctgcaatgactgagaatgcagttttttagtgattgcaattactatctcatttattcttgcttttatttctttcctctgttcctcttccctcttttttaatcatgttcttaagacttcttttctgtgccaaaatcagtaaagttacactctgaagggatatcatcctttcaaacgggccatctaaggcagctaattatgcattgcattggggtctctactgagaaaaattctgtgacttgaactaaatatttttaaatgtggattttttttgaaactaatatttaatattgcttctcctgcatggcaaaactgcctattctgctatttaaaaaccctcaatgactttattttctactgccgcctttttcatgtgcaaccaaaatgaaaatgtttaaattaactgtgttgtacaaatggtacccaacacaaactttttttaaattagtaatacttttgtttaaagttttaagtttgcattttgactttttttgtaaggatgtatgttgtgtgtttaacctttattaactaacgttaaaagctgtgatgtgtgcgtagaatattacgtatgcatgttcatgtctaaagaatggctgttgatgataaaataaaaatcagctttcatttttctaaaaaaaaaaaaaaaaaaaaaaaaa

SEQ ID NO: 234 - DNA, 2859 bp, Homo Sapiens
aaagtccccggcccgttttcctcctgtgaagacatagctgcgggtggctgtgctggtggcgttcaagatgtcgaccaagaatttccgagtcagtgacggggactggatttgccctgacaaaaaatgtggaaatgtaaactttgctagaagaaccagctgtaatcgatgtggtcgggagaaaacaactgaggccaagatgatgaaagctgggggcactgaaataggaaagacacttgcagaaaagagccgaggcctatttagtgctaatgactggcaatgtaaaacttgcagcaatgtgaattgggccagaagatcagagtgtaatatgtgtaatactccaaagtatgctaaattagaagaaagaacaggatatggtggtggttttaatgaaagagaaaatgttgaatatatagaaagagaagaatctgatggtgaatatgatgagtttggacgtaaaaagaaaaaatacagagggaaagcagttggtcctgcatctatattaaaggaagttgaagataaagaatcagagggagaagaagaggatgaggatgaagatctttctaaatataagttagatgaggatgaggatgaagatgacgctgatctctcaaaatataatcttgatgccagtgaagaagaagatagtaataaaaagaaatctaatagacgaagtcgctcaaagtctcgatcttcacattcacgatcttcatcacgctcatcctccccctcaagttcaaggtctaggtccaggtcccgttcaagaagttcttccagttcgcagtcaagatctcgttccagttccagagaacgttcgagatctcgtgggtcgaaatcaagatccagctccaggtcccacaggggctcttcttccccacgaaaaagatcttattcaagttcatcatcttctcctgagaggaacagaaagagaagtcgttctagatcttcttcatctggtgatcgcaaaaaaagacgaacaagatcacggtcacccgaaagacgccacaggtcatcatctggatcatcccattctggttcccgttcaagttcaaaaaagaaataatgtattaaaatttacatcttaaaaaaatccagtacagtgcatgaagcatatttttaaagaagttggtgtcttacttggtcagaagtgctaaatctgctagtagaggtgcatgcctttcattgcttttcaaaacaatacagctgtgtttatttgtgaagttaaaagtaaatagcattttaagccataatgtcccaaaatagatgttctgtcattcattatttacaaccatttgcttcatttaaaaccatttcagctataacaaagtactttgcttcctaatttaaacccatttttgtcatttccaaatacatcctgtccattggctaagacaggattacctaggcttgcctgaactttgggcatggaagaaagactggaaactagttggaaacaacatacttatggaaaagaaagtcagcctttttatgctgttaacagatgtcagagtgattctcaccaaaaaaagttaaactatgttgtaagcagccaactgtaaatgtctattttgaaattccctatgctaagggtgccttagaatcattgtgtctcttttatccagctttacttttttgctccacatttaatgcaaaagaatcttgtgatgtctacaaggagagaagtgggatatattttcctttctgacacataatttggggcaaaaaagaaagtcttaagagtttatcttttctctgctgatacggttgcttgataaagacatctcaaaatgtttaccaatgttttaagaagctttgtgtgatattcttccaaatgtagttaccaaatataatatggtagaaaaggctaaatcatacttaatgagcaaattgaagtaagcttttaaagtatatttctcttttggtgaaaggccaatggagacattgtgaatttaagtgaacatttgcctcaagatgttaactataaacacactgcatacaattttcttctgaataacaaatgaatgcttattgctgcatgatgtaagcaaaagtcattatttttcctattcatttgaaataagttatggcttaaaatgcttttggagtttatttctcaaaattaaaatctggtcacatgagctttagtttgttttctggtttaaaaaataaaaaggtttctcttaacagtatttccagtgacaatgcaaggtaagtatatcaaaggaaatcaacagttgtgcttgggggctttttgttatgggatattgatttcttgttttttttccgtaacattgtctgctgcaatttaaataaaaattacgacattttaagatatttcatagacaaaccaaacaaaaatatatgtttttactttaaagtgaatgtttttctcttcagctgatctaaaaatgaaagcaagatatcttatgtagaaatattttgataatatttttacagtgagctttcccatgtttttatgtcttaagtttctttgctgcgtttatgtaggttgcacaagaacttttactcacttgtaattgtgcctcagactttttgaaagtctaccttctaaattgccccgacgatctagattctacatgttaccattggtttattcttgtgctttctgtatttaaaactttggctgtactaagcaaatgcaaggttataatttagctaatagtagtttacagacaattctgatgattatgatttcatttggtttaactaagctgtactagttcatttcataaggaaatgatactgtagacaaatgtaaataaagcctgtgagtcaagcatcaagtggtgtttgttagaaataaactagagatttttaaactctgaaaaaaaaaaaaaaaaa

SEQ ID NO: 235 - DNA, 3241 bp, Homo Sapiens
gaggcggcagctgcgcggcggcaccggggcggctgcggcgcgctcggagccccgagggcacgcggcccgggcagctcggtgtgcgcccccgcgagagccggggccccaggcccgccggacaccatgaaccacctgaacgtgctggccaaagcgctctatgacaatgtggccgagtccccggatgagctctccttccgcaagggtgacatcatgacggtgctggagcaggacacgcagggcctggacggctggtggctctgctcgctgcatgggcgccagggcatcgtgcctgggaaccgcctcaagatcttggtgggcatgtatgataagaagccagcagggcctggccccggccctcccgccaccccggcccagcctcagcctggcctccatgccccagcgcctccggcctcccagtacacgcccatgctccccaacacctaccagccccagccagacagcgtctacctggtgcccactcccagcaaggctcagcaaggcctctaccaagtcccgggtcccagccctcagttccagtctcccccagccaagcagacatccaccttctcgaagcagacaccccatcacccgtttcccagcccggccacagacctgtaccaggtgcccccagggcctggaggccctgcccaggatatttaccaggtgccaccttctgccgggatggggcatgacatctaccaggtccccccgtccatggacacacgcagctgggagggcacgaagcccccggcaaaggtggtggtgcccacccgcgtggggcagggctatgtatacgaggccgcccagccggagcaggacgagtacgacatcccgcgacacctgctggccccggggccacaggacatctatgatgtgcccccggttcgggggctgcttcccagccagtatggccaggaggtgtatgacacaccccccatggctgtcaagggtcccaatggccgagacccgttgctggaggtgtatgacgtgccccccagtgtggagaagggcctgccaccgtccaaccaccacgcagtctacgacgttcctccatcggtgagcaaggatgtgcccgatggcccactgctgcgtgaggagacctacgatgtgccccccgccttcgccaaggccaagccctttgacccggcccgcaccccactggtactggctgcgccccctccagactccccgccggccgaggacgtgtatgacgtgccgcccccggctcctgacctctacgacgtgccccctggcttgcggcggcctggcccgggcaccctgtacgatgtgccccgtgaacgggtgcttcctcctgaggtggctgatggtggcgtggtcgacagtggtgtgtatgcggtgcctcccccagctgaacgtgaagccccggcagagggcaagcgcctgtcggcctccagcaccggcagcacacgcagcagccagtctgcgtcctccttggaggtggcagggccgggccgggaacccctggagctggaagttgctgtggaggccctggcacggctgcagcagggtgtgagcgccaccgttgcccaccttctggacctggcaggcagcgccggtgcgactgggagctggcgtagcccctctgagccacaggagccgctggtgcaggacctgcaggctgctgtggccgctgtccagagtgccgtccacgagctgttggagtttgcccgcagcgcggtgggcaatgctgcccacacatctgaccgtgccctgcatgccaagcttagccggcagctgcagaagatggaggacgtgcaccagacgctggtggcacatggtcaggccctcgacgctggccggggaggctctggagccacccttgaggacctggaccggctggtggcctgctcgcgggctgtgcccgaggacgccaagcagctggcctccttcctgcacggcaatgcctcactgctcttcagacggaccaaggccactgccccggggcctgaggggggtggcaccctgcaccccaaccccactgacaagaccagcagcatccagtcacgacccctgccctcaccccctaagttcacctcccaggactcgccagatgggcagtacgagaacagcgaggggggctggatggaggactatgactacgtccacctacaggggaaggaggagtttgagaagacccagaaggagctgctggaaaagggcagcatcacgcggcagggcaagagccagctggagttgcagcagctgaagcagtttgaacgactggaacaggaggtgtcacggcccatagaccacgacctggccaactggacgccagcccaacccctggccccggggcgaacaggcggcctggggccctcggaccggcagctgctgctcttctacctggagcagtgtgaggccaacctgaccacactgaccaacgccgtggacgccttctttaccgccgtggccaccaaccagccgcccaagatctttgtggcgcacagcaagttcgtcatcctcagcgcccacaagctggtgttcatcggggacacactgtcacggcaggccaaggctgctgacgtgcgcagccaggtgacccactacagcaacctgctgtgcgacctcctgcgcggcatcgtggccaccaccaaggccgctgccttgcagtacccatcgccttccgcggcccaggacatggtggagagggtcaaggagctgggccacagcacccagcagttccgccgcgtcctaggccagctggcagccgcctgagggtggtgaccccaggagggaggcaggggaggggtgcggcggtcccagctccctggctcccatgtcaagagtcgctgtgccacaggcttagggacaggaccccagctctgcgtcggtcctggtgccctggatgcccaggaatctgtatatatttatggccgggcagggtgtggggccatgcctcctcaggagccgaagcccaggggccggccagtggccttccccagcatgcaccacgggcccgggttgggtcaccagacggggctggagtgtgagggtcctgcagcctgcaggacctcgtgccaccccgagggctgagcctggtcccacgagggtgccgtgtcccctgacagggccagtgcagtttggtgtgtcctccgccttaccaggagaagaacctgaagaactatttttcgttattggttttccaatcatttgactaagagtctccatttaaataaagtttttaaaaggaagagcaaaaaaaaaaaaaaaaaaaaaaaaa

SEQ ID NO: 236 - DNA, 2632 bp, Homo Sapiens
ggggaagcgattgcgagccagcgcgcgcgcttcggcgttcccggcggtctgcgaagtttccggagccccggtcccgccgcgggttcgcgcttgtgctcgcgctcgttcctggagtcggcggccgctgcgcgcgctcgttgcccaacccggtccccgcccccagacacgccgggctctcggggcaccacagccatgtgctcgttagcgtcaggcgctaccggcggccggggcgctgtggagaatgaggaggacctgccagaactgtcggacagcggggacgaggccgcctgggaggatgaggacgatgcagatctcccccacggcaagcagcagaccccctgcctgttctgtaacaggttattcacatctgctgaagaaacattttcacactgtaagtctgagcatcagtttaatattgacagcatggttcataaacatggacttgaattttatggatacattaagctaataaattttattagacttaagaatcctacagttgagtacatgaattccatatacaacccagtgccttgggagaaagaagagtatttgaagccagtattagaagatgaccttttacttcaatttgatgtagaagatctttatgaaccggtgtcagtacccttctcataccccaatggactcagtgaaaatacatctgttgttgaaaaattgaaacatatggaagccagggcactgtctgctgaagccgcattggccagagcacgtgaggatctgcaaaaaatgaaacaatttgctcaggattttgtgatgcacacagatgtcagaacctgctcgtcatctactagtgtcattgcggacctccaggaggatgaggatggtgtttatttcagctcatacgggcattatgggatacatgaagaaatgctaaaggacaaaatacgaacagaaagctaccgagatttcatataccaaaatccacatatcttcaaagacaaggtagttttggatgttgggtgtggaactggaattctctctatgtttgctgctaaagctggggcgaagaaggttcttggagttgatcaatctgaaatactttaccaggcaatggatattataagactaaataaacttgaagatactattacactaattaaaggaaagattgaagaagttcatcttcctgtagaaaaagtagatgttatcatatctgagtggatgggctattttcttctgtttgagtctatgttagattctgtcctttatgcaaagaacaaatacttggcaaaaggaggctcggtctaccctgacatttgcactatcagccttgtagcagtgagtgatgtgaataaacatgctgatagaattgctttttgggatgatgtctatggcttcaagatgtcctgcatgaagaaagcagttattccagaagctgttgtggaagttttagatccgaagactcttatttcagaaccttgtggtattaagcatatagattgccatacgacgtctatctcagatttggaattttcatcagattttaccctgaaaatcacaaggacatccatgtgcacggcaattgctggctactttgatatatattttgagaagaattgccacaacagggtcgtgttctctacgggccctcagagcaccaaaacacactggaaacaaacagtatttctactggaaaaaccattttcagttaaagcaggtgaagccttgaaaggaaaggtcacagttcacaagaataagaaagatccacgttctctcaccgtgaccctcacgttgaataattcaactcaaacttatggtctccagtgaaacagccataaaagcacactaccttgtagtttttaatgtgggggtagagtgggtcagcaggagggagctggttttatgtgagcagatggatggatgatggaccctttcctaatgagcctcctcaataagagagaagttctcattgtgggaatctgacatagttcagctgaggaagagaatcagctgatcctcatggtctgccacgtaatcattttcttagacgtttgctccaccagatttaaccaaatgtaactcccacattgagtttatctatattgaaaatcatttacattggcctatatttggaagagagatagtcttttgtttttaataagtttcttactataaattttaaacaaattggttagttatttggatattttattaaactagtaacacaggtactacacattttattatggactcctctgaggaggagtttttaattgtatttgctagaaaatcaggatgtaataaagatttgtataaaaaaactaaaatatggaaaagagcttcagccttcatatacaaatcatatatgcagacagcctagttgattatctagcatacttagggttctcattttgtagtttcttccctctttgtgactattccttagccttatagatttctagtactgcccaggaaatctaatttcaatacatttatcctaggtttcatgaaagtttttaaagattgggataaatatgtacttatttactaacgtattatctttttcaaaccagatttatgtgcaaaggttaaacatgtaactgttactaagcagtctataaagttgtcatttacaattactaaaaaaaaaaaaaaaaaaaaaaaaaaaaaa

SEQ ID NO: 237 - DNA, 4192 bp, Homo Sapiens
agcggataagctccagccttcctgtggccacagcaggaccagagtggaccagcacaccccaggagagaggactggggtcccaggagtaggaggagcccgagcaccatgagctccggagaccctgcacacctcggcctctgcgtctggctgtggctgggcgccaccctgggaagagagcaagttcaagcaagcggtctcctgaggctggctgtgctgcctgaggaccggctgcagatgaagtggagagagtcggaggggagcggcctcggctacctggtgcaggtgaagcccatggcaggggactcggaacaggaggtgatactgaccaccaagacccataaggccacagtggggggcctgagcccctccaagggctacaccttgcagatcttcgagctcactggctctgggcgcttcctgctagctcggagggagtttgtgattgaggatctgaagagtagctccctggacaggagcagccagaggcccctcggctctggagccccggagcccaccccctcccacacggggagcccagaccctgagcaggcttctgagccccaagttgccttcacaccaagccaggatccgcgcactcctgccggcccccagttccgctgcctgccccccgtgcctgctgacatggtcttcctggtggacgggtcctggagcattggccacagtcacttccagcaggtcaaggacttcctggccagtgtcatcgcaccctttgaaatcgggccggataaggtccaagtaggcctgactcagtacagcggggatgctcagactgagtgggacctgaactccctcagcaccaaggaacaggtgctggcagctgtgcgccgcctccgctacaagggggggaacacgttcacaggccttgccctgacccacgtgctggggcagaacctgcagccggcggctggcctccgtccagaggcagccaaggtggtgattctggtgacggacggcaagtcccaggacgatgtgcacactgctgcccgtgtcctcaaggacctgggcgtgaacgtcttcgctgtgggtgtgaagaacgccgatgaggctgagctgaggctcctggcgtccccgccgagggacatcaccgtccacagcgtgctggacttcctgcagctcggcgcgctggctggcctgctcagccgtctcatctgccagaggctccagggtgggagcccgcggcagggcccagcagcggctccagccctggacaccctccctgcccccaccagcctggtcctgagccaggtgacctcctccagcatccgcctgtcctggactccagccccccggcaccccctcaagtatctgatcgtttggcgagcctctagaggtggcacccccagggaggtggtggtggaggggcccgccgcctccacggagctgcacaacctggcctcccgcacagagtacctggtctccgtgttccccatctatgagggcggggttggcgaaggcctgcggggcctggtgaccacagcacctctgcctccgccccgggcgctgaccctggccgcagtgacgcccagaaccgtccacctcacctggcagccatcggccggggccacccactacctggtgcgatgttctcctgcttcccccaagggtgaagaggaggagcgagaggtgcaggtcgggcggcccgaggtgctgctggatggcctggaacctggcagggactatgaggtctcggtgcagagcctgcgaggccctgagggcagcgaggcccggggcatccgtgccaggacccccaccctggcccccccgagacacctgggcttctcagacgtgagccacgacgcggcacgagtgttctgggagggtgccccgaggcctgtgcgcctggtcagggtcacctatgtgtccagcgagggtggacactcggggcagacagaggctcctgggaacgccacctcggccacgctggggcctctctcttcctccaccacctacactgtccgtgtcacctgcctctaccctgggggtggctcctctacgctgactggccgggtgaccaccaagaaagctcccagcccaagccagctgtccatgacggagctgccaggggatgcagtccagctggcgtgggtggccgcagccccgtctggcgtgcttgtctaccagatcacgtggacgcccctgggagaggggaaggctcacgagatctctgtcccagggaacctcggcacggccgtcctgcctggcctagggaggcacacagagtacgacgtcaccatcttggcctactacagggacggggcccgcagtgaccctgtgtccctccgctataccccctccacggtgagcaggagcccaccctccaacctggccctggcctcggagacccccgacagcctgcaggtcagctggacgcccccgcttggccgcgtgctccattactggctcacctacgcccccgcctctggcttgggacccgagaaatccgtctctgtgccaggagccaggagccacgtgacactgcccgacctgcaggcagccacgaagtacagggtcctggtctcagctatctatgcagcaggcaggagtgaggctgtgtctgccacgggccagacagcctgcccagccctccgccctgacggctccctcccagggtttgacctgatggtggccttcagcctggtggaaaaggcttatgcgtccatccggggcgtggccatggagccctctgccttcggtgggaccccgaccttcacgctcttcaaggacgcccagctgacaagacgggtcagtgacgtctacccagcccccctacctccagagcacaccatcgtcttccttgtgcgcctacttcccgagacaccccgtgaggccttcgcgctgtggcagatgacagccaaggacttccagcccctccttggggttctgctggatgccgggaagaagtccctgacctacttccaccgtgaccccagggctgccttgcaggaggccaccttcgacccgcaggaagtgaggaagattttcttcgggagcttccacaaggtgcacgtggctgtgggccgctccaaggtcaggctctatgtggactgccggaaggtggctgagcggccccttggggagatgggcagcccacccgctgccggcttcgtcacgctggggaggctggccaaggccaggggccccaggagcagttcggccgcgtttcagctccagatgctgcagatcgtgtgcagtgacacctgggccgatgaggaccggtgctgtgagctccctgcctcgagggatggagagacctgccccgccttcgtgtctgcctgttcctgttcctcagagacccctgggcccccaggacctcaaggacccccaggcctccctgggaggaatggcaccccaggagagcagggcttcccagggcccaggggtccaccaggggtcaaaggagagaagggagaccatgggcttccaggcttgcagggccaccccggccaccagggcatccccgggagagttggcctccagggaccaaagggaatgagaggcctggagggaactgctggcctgcctggaccccctggccccagggggttccagggcatggcaggggccaggggcactagtggagagcgaggacctccagggaccgtggggcccacaggactgccagggcccaaaggggaacgaggagagaagggcgagcagcagtcccttgccaccctctaccagcttgtgagccaggcctcacacgtgtcaaagttcgactccttccacgagaacaccaggccccccatgcccatcttggagcagaagctggagccgggcactgagcccctggggtcacctggcacccgcagcaaggccctggttcctggagaatgggggcgtggtggccgccaccttgagggcagaggggagcctggagctgttggtcagatgggcagccctgggcagcagggggctagcacccagggcctctgggagtgacaggacattttctgcactgccccgaggaacgctgagccttcctccctgggtttgtctggacaccgagagcgaccacatcctggagaagccaggagaaaagctcaggaagagcctgcaggtggaaggagagggaagcagcggcctcggccaaggcccaccccatactcttggctctgtagcatttccaagttcagataaacccctgagtgctcacccaaaaaaaaaaaaaaaa

SEQ ID NO: 238 - DNA, 3914 bp, Homo Sapiens
gcgcagaggcctctgggtaggtggctcaaccccgcctctcagttgaggactctgaaggctgtttctgtggcgcttcccctgcgaggatggctaccctggttgtaaacaagctcggagcgggagtagacagtggccggcagggcagccgggggacagctgtagtgaaggtgctagagtgtggagtttgtgaagatgtcttttctttgcaaggagacaaagttccccgtcttttgctttgtggccataccgtctgtcatgactgtctcactcgcctacctcttcatggaagagcaatccgttgcccatttgatcgacaagtaacagacctaggtgattcaggtgtctggggattgaaaaaaaattttgctttattggagcttttggaacgactgcagaatgggcctattggtcagtatggagctgcagaagaatccattgggatatctggagagagcatcattcgttgtgatgaagatgaagctcaccttgcctctgtatattgcactgtgtgtgcaactcatttgtgctctgagtgttctcaagttactcattctacaaagacattagcaaagcacaggcgagttcctctagctgataaacctcatgagaaaactatgtgctctcagcaccaggtgcatgccattgagtttgtttgcttggaagaaggttgtcaaactagcccactcatgtgctgtgtctgcaaagaatatggaaaacaccagggtcacaagcattcagtattggaaccagaagctaatcagatccgagcatcaattttagatatggctcactgcatacggaccttcacagaggaaatctcagattattccagaaaattagttggaattgtgcagcacattgaaggaggagaacaaatcgtggaagatggaattggaatggctcacacagaacatgtaccagggactgcagagaatgcccggtcatgtattcgagcttatttttatgatctacatgaaactctgtgtcgtcaagaagaaatggctctaagtgttgttgatgctcatgttcgtgaaaaattgatttggctcaggcagcaacaagaagatatgactattttgttgtcagaggtttctgcagcctgcctccactgtgaaaagactttgcagcaggatgattgtagagttgtcttggcaaaacaggaaattacaaggttactggaaacattgcagaaacagcagcagcagtttacagaagttgcagatcacattcagttggatgccagcatccctgtcacttttacaaaggataatcgagttcacattggaccaaaaatggaaattcgggtcgttacgttaggattggatggtgctggaaaaactactatcttgtttaagttaaaacaggatgaattcatgcagcccattccaacaattggttttaacgtggaaactgtagaatataaaaatctaaaattcactatttgggatgtaggtggaaaacacaaattaagaccattgtggaaacattattacctcaatactcaagctgttgtgtttgttgtagatagcagtcatagagacagaattagtgaagcacacagcgaacttgcaaagttgttaacggaaaaagaactccgagatgctctgctcctgatttttgctaacaaacaggatgttgctggagcactgtcagtagaagaaatcactgaactactcagtctccataaattatgctgtggccgtagctggtatattcagggctgtgatgctcgaagtggtatgggactgtatgaagggttggactggctctcacggcaacttgtagctgctggagtattggatgttgcttgattttaaaggcagcagttgtttgaagttttgtggttaaaagtaactttgcacatagtatgttttaagaaattatacatctcaaaagatggtaatttaggatgcatatatatatatatatatataaaggaatcttggattgggaattcagtactttgctttaaaaaaattttgtggcagaattaaatttctaattgagcagattagattgaattaaatagaaacttattgaatatacattcttttaaaaagtatatttgttatttaagtttttcagataatatgtgaccaatatactgggaaagaggtagtcacagagaaagggtaagtgaaggtttattctttcagtgaaaaaagaatagccaattgagtgcctaatgagacctctgtgtgaagcaagtgaagtatagctgcttcttttaacctgccttttcactgaatgttggcagcatttagtagtagaaatgacagttgcttaatgaaatagaatccaaactacatatttggataataggattactttatgtttatgttcagagttaacagaacacctttaatgctaagaactataaggtacagaaaattaatactttatatagtgttttattaactttctcctacagcattttgtataaaacacaatgagggagtgaaatgttacccaattaggcttgtcaggttagtaataaactgaacagtaataaaactgtggaagtaattggatctgaatttatgaaagacccatttccaggactgaacctaggtcagagctctaaattggtccttctatttttcaacaaatttaaagtaatatttctttctaatataatattgcatcctttgtgggaatgactataggtaaaatgtagtaagtaacgcagaaccagggttggctttatttaaaagctagtgacctaaatagaaagcgaacttcaagagaagttgtaagtacagtggcaaatgcttattacttacttcaaactgtttcccaaaataagtgcatttattttgacaataaaacttaaggctgttcatgagaaggccttgaaaagttactctagaggaaaaatgtctaaagaaaaaaaaaattcaaaaagtttacattaattattcagtgttgtgagtaaataaaaatgtgtgctctttactgtttttcatttttaaagaatattattatggaagcacgatttatttaaataggtacattgagacttttttttttttaatgttctgatacattaggatgaagttaaatcttaaatcttattagttgaattgttgtaaggacagtgatgtctggtaacaagatgtgactttttggtagcactgttgtggttcattcttttcaaatctatttttgtttaaaaacaatacaagttttagaaaacaaagcattaaaaaaaaagcctatcagtattatgggcaatatgtaaataaataaatgtaatatttcatcctttatttttcaggtaaaaggtcatgctgttacaggtgtagtttgtgtgcataaataatacttccgaattaaattatttaatatttgactgatttcaataactgtgaaaaataaaaaaggtgttgtattgcttgtgagaacttgaactgtttactagttaattgaagaaaaagtgtaacactaaggtgaacttgcttcccttttcactaattttgctaaactttgtaatgcacattcttagcatataactgaacacagttgaaaaattgtgcctgattataatgtatgtataatggtaggtgtttgtgtgtgattcatttttaaagaaatatttttctcaagctcctattactatttgtggttgtattatttcactaatcattagttaagactgtgctagtcttccctgggaaactaagaagagagcttttttatatacagtatattagaattttcctagtagctgaatttctgtattaggtctaaatattactgtatgttatataaagcaggtatgtcaagtgtatagccgtagtctataattcaggaatgctttataaccatcagaagccattatttgcactacatatatgataagtatagacagcaataaaatgttaagatcatttttaagaaaaaaaaaaaaaaaa

SEQ ID NO: 239 - DNA, 1548 bp, Homo Sapiens
caacatggcggccgcggtggcggcggcacctggggccttgggatccctgcatgctggcggcgcccgcctggtggccgcttgcagtgcgtggctctgcccggggttgaggctgcccggctcgttggcaggccggcgagcgggcccggcgatctgggcccagggctgggtacctgcggccgggggtcccgccccgaaaaggggctacagctctgagatgaagacggaggacgagctgcgggtgcggcacctggaggaggagaaccgaggaattgtggtgcttggaataaacagagcttatggcaaaaattcactcagtaaaaatcttataaaaatgctatcaaaagctgtggatgctttgaaatctgataagaaagtacggaccataataatcaggagtgaagtcccagggatattctgtgctggtgctgaccttaaggaaagagccaaaatgagttccagtgaagttggtccttttgtctccaaaataagagcagtgattaacgatattgctaatcttccagtgccaacaattgcagcaatagatggactcgctttaggtggtggtcttgaactggctttagcctgtgatatacgagtagcagcttcctctgcaaaaatgggcctggttgaaacaaaattggcgattattcctggtggaggggggacacagcgattgccacgcgccattggaatgtccctggccaaggagctcatattctctgcgcgagtcctcgatggcaaagaagccaaagcagtgggcttaatcagccacgttctggaacagaaccaggagggagacgcggcctacaggaaggccttggacctggcgagagagtttttacctcagggacctgttgcaatgagagtggcaaaattagcaattaatcaagggatggaggtcgatttagtaacagggttagccatagaagaagcttgttatgctcagaccattccaacaaaagacagacttgaaggtcttcttgcttttaaagagaaaaggccccctcgctataaaggagaataaaaggaacagaaattcttaagatgccaatgtaataaatgtacttcctggaagtgtctttcggatccactatatgcctcagcacatggaaccttaatgaccaaagtgaagagcagattattcatacggtgtaataagcgtctggaatggacccatccgtgtacttcattcaaatgtgtaaatgtcatattcattcagatttataaagctagtagtgtatagtcagaaacagaatcaaagttagatatacatttttaaatatttactgcatatgaggctttctgttaattttttaatgtgaataatttatatattgcacattctaggaataatattgattgtatgtctactgtgctgcattaagaaaataaaatttctatataccaaaaatgtgaagttataccaaataaagtttctaagtgattaatgcatacgaacagctacatatacatatatctaaacctgaaaaatgaattgatattctgagtgaaaactacctaatataaataaaattagtgaaaagaaaa

SEQ ID NO: 240 - DNA, 1125 bp, Homo Sapiens
gtctcccccactgtcagcacctcttctgtgtggtgagtggaccgcttaccccactaggtgaagatgtcagcccaggagagctgcctcagcctcatcaagtacttcctcttcgttttcaacctcttcttcttcgtcctcggcagcctgatcttctgcttcggcatctggatcctcatcgacaagaccagcttcgtgtcctttgtgggcttggccttcgtgcctctgcagatctggtccaaagtcctggccatctcaggaatcttcaccatgggcatcgccctcctgggttgtgtgggggccctcaaggagctccgctgcctcctgggcctgtattttgggatgctgctgctcctgtttgccacacagatcaccctgggaatcctcatctccactcagcgggcccagctggagcgaagcttgcgggacgtcgtagagaaaaccatccaaaagtacggcaccaaccccgaggagaccgcggccgaggagagctgggactatgtgcagttccagctgcgctgctgcggctggcactacccgcaggactggttccaagtcctcatcctgagaggtaacgggtcggaggcgcaccgcgtgccctgctcctgctacaacttgtcggcgaccaacgactccacaatcctagataaggtgatcttgccccagctcagcaggcttggacacctggcgcggtccagacacagtgcagacatctgcgctgtccctgcagagagccacatctaccgcgagggctgcgcgcagggcctccagaagtggctgcacaacaaccttatttccatagtgggcatttgcctgggcgtcggcctactcgagctcgggttcatgacgctctcgatattcctgtgcagaaacctggaccacgtctacaaccggctcgctcgataccgttaggccccgccctccccaaagtcccgccccgcccccgtcacgtgcgctgggcacttccctgctgcctgtaaatatttgtttaatccccagttcgcctggagccctccgccttcacattcccctggggacccacgtggctgcgtgcccctgctgctgtcacctctcccacgggacctggggctttcgtccacagcttcctgtccccatctgtcggcctac

SEQ ID NO: 241 - DNA, 1644 bp, Homo Sapiens
ggcgagatggcggccaccgagggggtcggggaggctgcgcaagggggcgagcccgggcagccggcgcaacccccgccccagccgcacccaccgccgccccagcagcagcacaaggaagagatggcggccgaggctggggaagccgtggcgtcccccatggacgacgggtttgtgagcctggactcgccctcctatgtcctgtacagggacagagcagaatgggctgatatagatccggtgccgcagaatgatggccccaatcccgtggtccagatcatttatagtgacaaatttagagatgtttatgattacttccgagctgtcctgcagcgtgatgaaagaagtgaacgagcttttaagctaacccgggatgctattgagttaaatgcagccaattatacagtgtggcatttccggagagttcttttgaagtcacttcagaaggatctacatgaggaaatgaactacatcactgcaataattgaggagcagcccaaaaactatcaagtttggcatcataggcgagtattagtggaatggctaagagatccatctcaggagcttgaatttattgctgatattcttaatcaggatgcaaagaattatcatgcctggcagcatcgacaatgggttattcaggaatttaaactttgggataatgagctgcagtatgtggaccaacttctgaaagaggatgtgagaaataactctgtctggaaccaaagatacttcgttatttctaacaccactggctacaatgatcgtgctgtattggagagagaagtccaatacactctggaaatgattaaactagtaccacataatgaaagtgcatggaactatttgaaagggattttgcaggatcgtggtctttccaaatatcctaatctgttaaatcaattacttgatttacaaccaagtcatagttccccctacctaattgcctttcttgtggatatctatgaagacatgctagaaaatcagtgtgacaataaggaagacattcttaataaagcattagagttatgtgaaatcctagctaaagaaaaggacactataagaaaggaatattggagatacattggaagatcccttcaaagcaaacacagcacagaaaatgactcaccaacaaatgtacagcaataacaccatccagaagaacttgatggaatgcttttattttttattaagggaccctgcaggagtttcacacgagagtggtccttccctttgcctgtggtgtaaaagtgcatcacacaggtattgctttttaacaagaactgatgctccttgggtgctgctgctactcagactagctctaagtaatgtgattcttctaaagcaaagtcattggatgggaggaggaagaaaaagtcccataaaggaacttttgtagtcttatcaacatataatctaatcccttagcatcagctcctccctcagtggtacatgcgtcaagatttgtagcagtaataactgcaggtcacttgtatgtaatggatgtgaggtagccgaagtttggttcagtaagcagggaatacagtcgttccatcagagctggtctgcacactcacattatcttgctatcactgtaaccaactaatgccaaaagaacggttttgtaataaaattatagctgtatct

SEQ ID NO: 242 - DNA, 3851 bp, Homo Sapiens
ctctcccaaccgcctcgtcgcactcctcaggctgagagcaccgctgcactcgcggccggcgatgcgggaccccggcgcggccgctccgctttcgtccctgggcctctgtgccctggtgctggcgctgctgggcgcactgtccgcgggcgccggggcgcagccgtaccacggagagaagggcatctccgtgccggaccacggcttctgccagcccatctccatcccgctgtgcacggacatcgcctacaaccagaccatcctgcccaacctgctgggccacacgaaccaagaggacgcgggcctcgaggtgcaccagttctacccgctggtgaaggtgcagtgttctcccgaactccgctttttcttatgctccatgtatgcgcccgtgtgcaccgtgctcgatcaggccatcccgccgtgtcgttctctgtgcgagcgcgcccgccagggctgcgaggcgctcatgaacaagttcggcttccagtggcccgagcggctgcgctgcgagaacttcccggtgcacggtgcgggcgagatctgcgtgggccagaacacgtcggacggctccgggggcccaggcggcggccccactgcctaccctaccgcgccctacctgccggacctgcccttcaccgcgctgcccccgggggcctcagatggcagggggcgtcccgccttccccttctcatgcccccgtcagctcaaggtgcccccgtacctgggctaccgcttcctgggtgagcgcgattgtggcgccccgtgcgaaccgggccgtgccaacggcctgatgtactttaaggaggaggagaggcgcttcgcccgcctctgggtgggcgtgtggtccgtgctgtgctgcgcctcgacgctctttaccgttctcacctacctggtggacatgcggcgcttcagctacccagagcggcccatcatcttcctgtcgggctgctacttcatggtggccgtggcgcacgtggccggcttccttctagaggaccgcgccgtgtgcgtggagcgcttctcggacgatggctaccgcacggtggcgcagggcaccaagaaggagggctgcaccatcctcttcatggtgctctacttcttcggcatggccagctccatctggtgggtcattctgtctctcacttggttcctggcggccggcatgaagtggggccacgaggccatcgaggccaactcgcagtacttccacctggccgcgtgggccgtgcccgccgtcaagaccatcactatcctggccatgggccaggtagacggggacctgctgagcggggtgtgctacgttggcctctccagtgtggacgcgctgcggggcttcgtgctggcgcctctgttcgtctacctcttcataggcacgtccttcttgctggccggcttcgtgtccctcttccgtatccgcaccatcatgaaacacgacggcaccaagaccgagaagctggagaagctcatggtgcgcatcggcgtcttcagcgtgctctacacagtgcccgccaccatcgtcctggcctgctacttctacgagcaggccttccgcgagcactgggagcgcacctggctcctgcagacgtgcaagagctatgccgtgccctgcccgcccggccacttcccgcccatgagccccgacttcaccgtcttcatgatcaagtacctgatgaccatgatcgtcggcatcaccactggcttctggatctggtcgggcaagaccctgcagtcgtggcgccgcttctaccacagacttagccacagcagcaagggggagactgcggtatgagccccggcccctccccacctttcccaccccagccctcttgcaagaggagaggcacggtagggaaaagaactgctgggtgggggcctgtttctgtaactttctccccctctactgagaagtgacctggaagtgagaagttctttgcagatttggggcgaggggtgatttggaaaagaagacctgggtggaaagcggtttggatgaaaagatttcaggcaaagacttgcaggaagatgatgataacggcgatgtgaatcgtcaaaggtacgggccagcttgtgcctaatagaaggttgagaccagcagagactgctgtgagtttctcccggctccgaggctgaacggggactgtgagcgatccccctgctgcagggcgagtggcctgtccagacccctgtgaggccccgggaaaggtacagccctgtctgcggtggctgctttgttggaaagagggagggcctcctgcggtgtgcttgtcaagcagtggtcaaaccataatctcttttcactggggccaaactggagcccagatgggttaatttccagggtcagacattacggtctctcctcccctgccccctcccgcctgtttttcctcccgtactgctttcaggtcttgtaaaataagcatttggaagtcttgggaggcctgcctgctagaatcctaatgtgaggatgcaaaagaaatgatgataacattttgagataaggccaaggagacgtggagtaggtatttttgctactttttcattttctggggaaggcaggaggcagaaagacgggtgttttatttggtctaataccctgaaaagaagtgatgacttgttgcttttcaaaacaggaatgcatttttccccttgtctttgttgtaagagacaaaagaggaaacaaaagtgtctccctgtggaaaggcataactgtgacgaaagcaacttttataggcaaagcagcgcaaatctgaggtttcccgttggttgttaatttggttgagataaacattcctttttaaggaaaagtgaagagcagtgtgctgtcacacaccgttaagccagaggttctgacttcgctaaaggaaatgtaagaggttttgttgtctgttttaaataaatttaattcggaacacatgatccaacagactatgttaaaatattcagggaaatctctcccttcatttactttttcttgctataagcctatatttaggtttcttttctatttttttctcccatttggatcctttgaggtaaaaaaacataatgtcttcagcctcataataaaggaaagttaattaaaaaaaaaaagcaaagagccattttgtcctgttttcttggttccatcaatctgtttattaaacatcatccatatgctgaccctgtctctgtgtggttgggttgggaggcgatcagcagataccatagtgaacgaagaggaaggtttgaaccatgggccccatctttaaagaaagtcattaaaagaaggtaaacttcaaagtgattctggagttctttgaaatgtgctggaagacttaaatttattaatcttaaatcatgtactttttttctgtaatagaactcggattcttttgcatgatggggtaaagcttagcagagaatcatgggagctaacctttatcccacctttgacactaccctccaatcttgcaacactatcctgtttctcagaacagtttttaaatgccaatcatagagggtactgtaaagtgtacaagttactttatatatgtaatgttcacttgagtggaactgctttttacattaaagttaaaatcgatcttgtgtttcttcaaccttcaaaactatctcatctgtcagatttttaaaactccaacacaggttttggcatcttttgtgctgtatcttttaagtgcatgtgaaatttgtaaaatagagataagtacagtatgtatattttgtaaatctcccatttttgtaagaaaatatatattgtatttatacatttttactttggatttttgttttgttggctttaaaggtctaccccactttatcacatgtacagatcacaaataaatttttttaaatac

SEQ ID NO: 243 - DNA, 4788 bp, Homo Sapiens
tttttagaaaaaaaaaatatatttccctcctgctccttctgcgttcacaagctaagttgtttatctcggctgcggcgggaactgcggacggtggcgggcgagcggctcctctgccagagttgatattcactgatggactccaaagaatcattaactcctggtagagaagaaaaccccagcagtgtgcttgctcaggagaggggagatgtgatggacttctataaaaccctaagaggaggagctactgtgaaggtttctgcgtcttcaccctcactggctgtcgcttctcaatcagactccaagcagcgaagacttttggttgattttccaaaaggctcagtaagcaatgcgcagcagccagatctgtccaaagcagtttcactctcaatgggactgtatatgggagagacagaaacaaaagtgatgggaaatgacctgggattcccacagcagggccaaatcagcctttcctcgggggaaacagacttaaagcttttggaagaaagcattgcaaacctcaataggtcgaccagtgttccagagaaccccaagagttcagcatccactgctgtgtctgctgcccccacagagaaggagtttccaaaaactcactctgatgtatcttcagaacagcaacatttgaagggccagactggcaccaacggtggcaatgtgaaattgtataccacagaccaaagcacctttgacattttgcaggatttggagttttcttctgggtccccaggtaaagagacgaatgagagtccttggagatcagacctgttgatagatgaaaactgtttgctttctcctctggcgggagaagacgattcattccttttggaaggaaactcgaatgaggactgcaagcctctcattttaccggacactaaacccaaaattaaggataatggagatctggttttgtcaagccccagtaatgtaacactgccccaagtgaaaacagaaaaagaagatttcatcgaactctgcacccctggggtaattaagcaagagaaactgggcacagtttactgtcaggcaagctttcctggagcaaatataattggtaataaaatgtctgccatttctgttcatggtgtgagtacctctggaggacagatgtaccactatgacatgaatacagcatccctttctcaacagcaggatcagaagcctatttttaatgtcattccaccaattcccgttggttccgaaaattggaataggtgccaaggatctggagatgacaacttgacttctctggggactctgaacttccctggtcgaacagttttttctaatggctattcaagccccagcatgagaccagatgtaagctctcctccatccagctcctcaacagcaacaacaggaccacctcccaaactctgcctggtgtgctctgatgaagcttcaggatgtcattatggagtcttaacttgtggaagctgtaaagttttcttcaaaagagcagtggaaggacagcacaattacctatgtgctggaaggaatgattgcatcatcgataaaattcgaagaaaaaactgcccagcatgccgctatcgaaaatgtcttcaggctggaatgaacctggaagctcgaaaaacaaagaaaaaaataaaaggaattcagcaggccactacaggagtctcacaagaaacctctgaaaatcctggtaacaaaacaatagttcctgcaacgttaccacaactcacccctaccctggtgtcactgttggaggttattgaacctgaagtgttatatgcaggatatgatagctctgttccagactcaacttggaggatcatgactacgctcaacatgttaggagggcggcaagtgattgcagcagtgaaatgggcaaaggcaataccaggtttcaggaacttacacctggatgaccaaatgaccctactgcagtactcctggatgtttcttatggcatttgctctggggtggagatcatatagacaatcaagtgcaaacctgctgtgttttgctcctgatctgattattaatgagcagagaatgactctaccctgcatgtacgaccaatgtaaacacatgctgtatgtttcctctgagttacacaggcttcaggtatcttatgaagagtatctctgtatgaaaaccttactgcttctctcttcagttcctaaggacggtctgaagagccaagagctatttgatgaaattagaatgacctacatcaaagagctaggaaaagccattgtcaagagggaaggaaactccagccagaactggcagcggttttatcaactgacaaaactcttggattctatgcatgaagtggttgaaaatctccttaactattgcttccaaacatttttggataagaccatgagtattgaattccccgagatgttagctgaaatcatcaccaatcagataccaaaatattcaaatggaaatatcaaaaaacttctgtttcatcaaaagtgactgccttaataagaatggttgccttaaagaaagtcgaattaatagcttttattgtataaactatcagtttgtcctgtagaggttttgttgttttattttttattgttttcatctgttgttttgttttaaatacgcactacatgtggtttatagagggccaagacttggcaacagaagcagttgagtcgtcatcacttttcagtgatgggagagtagatggtgaaatttattagttaatatatcccagaaattagaaaccttaatatgtggacgtaatctccacagtcaaagaaggatggcacctaaaccaccagtgcccaaagtctgtgtgatgaactttctcttcatactttttttcacagttggctggatgaaattttctagactttctgttggtgtatcccccccctgtatagttaggatagcatttttgatttatgcatggaaacctgaaaaaaagtttacaagtgtatatcagaaaagggaagttgtgccttttatagctattactgtctggttttaacaatttcctttatatttagtgaactacgcttgctcattttttcttacataattttttattcaagttattgtacagctgtttaagatgggcagctagttcgtagctttcccaaataaactctaaacattaatcaatcatctgtgtgaaaatgggttggtgcttctaacctgatggcacttagctatcagaagaccacaaaaattgactcaaatctccagtattcttgtcaaaaaaaaaaaaaaaaaagctcatattttgtatatatctgcttcagtggagaattatataggttgtgcaaattaacagtcctaactggtatagagcacctagtccagtgacctgctgggtaaactgtggatgatggttgcaaaagactaatttaaaaaataactaccaagaggccctgtctgtacctaacgccctatttttgcaatggctatatggcaagaaagctggtaaactatttgtctttcaggaccttttgaagtagtttgtataacttcttaaaagttgtgattccagataaccagctgtaacacagctgagagacttttaatcagacaaagtaattcctctcactaaactttacccaaaaactaaatctctaatatggcaaaaatggctagacacccattttcacattcccatctgtcaccaattggttaatctttcctgatggtacaggaaagctcagctactgatttttgtgatttagaactgtatgtcagacatccatgtttgtaaaactacacatccctaatgtgtgccatagagtttaacacaagtcctgtgaatttcttcactgttgaaaattattttaaacaaaatagaagctgtagtagccctttctgtgtgcaccttaccaactttctgtaaactcaaaacttaacatatttactaagccacaagaaatttgatttctattcaaggtggccaaattatttgtgtaatagaaaactgaaaatctaatattaaaaatatggaacttctaatatatttttatatttagttatagtttcagatatatatcatattggtattcactaatctgggaagggaagggctactgcagctttacatgcaatttattaaaatgattgtaaaatagcttgtatagtgtaaaataagaatgatttttagatgagattgttttatcatgacatgttatatattttttgtaggggtcaaagaaatgctgatggataacctatatgatttatagtttgtacatgcattcatacaggcagcgatggtctcagaaaccaaacagtttgctctaggggaagagggagatggagactggtcctgtgtgcagtgaaggttgctgaggctctgacccagtgagattacagaggaagttatcctctgcctcccattctgaccacccttctcattccaacagtgagtctgtcagcgcaggtttagtttactcaatctccccttgcactaaagtatgtaaagtatgtaaacaggagacaggaaggtggtgcttacatccttaaaggcaccatctaatagcgggttactttcacatacagccctcccccagcagttgaatgacaacagaagcttcagaagtttggcaatagtttgcatagaggtaccagcaatatgtaaatagtgcagaatctcataggttgccaataatacactaattcctttctatcctacaacaagagtttatttccaaataaaatgaggacatgtttttgttttctttgaatgctttttgaatgttatttgttattttcagtattttggagaaattatttaataaaaaaacaatcatttgctttttg

SEQ ID NO: 244 - DNA, 4518 bp, Homo Sapiens
acaaaatggtcctttagaaaatacatctgaattgctggctaatttcttgatttgcgactcaacgtaggacatcgcttgttcgtagctatcagaaccctcctgaattttccccaccatgctatctttattggcttgaactcctttcctaaaatggtccttctgttgatcctgtcagtcttacttttgaaagaagatgtccgtgggagtgcacagtccagtgagaggagggtggtggctcacatgccgggtgacatcattattggagctctcttttctgttcatcaccagcctactgtggacaaagttcatgagaggaagtgtggggcggtccgtgaacagtatggcattcagagagtggaggccatgctgcataccctggaaaggatcaattcagaccccacactcttgcccaacatcacactgggctgtgagataagggactcctgctggcattcggctgtggccctagagcagagcattgagttcataagagattccctcatttcttcagaagaggaagaaggcttggtacgctgtgtggatggctcctcctcttccttccgctccaagaagcccatagtaggggtcattgggcctggctccagttctgtagccattcaggtccagaatttgctccagcttttcaacatacctcagattgcttactcagcaaccagcatggatctgagtgacaagactctgttcaaatatttcatgagggttgtgccttcagatgctcagcaggcaagggccatggtggacatagtgaagaggtacaactggacctatgtatcagccgtgcacacagaaggcaactatggagaaagtgggatggaagccttcaaagatatgtcagcgaaggaagggatttgcatcgcccactcttacaaaatctacagtaatgcaggggagcagagctttgataagctgctgaagaagctcacaagtcacttgcccaaggcccgggtggtggcctgcttctgtgagggcatgacggtgagaggtctgctgatggccatgaggcgcctgggtctagcgggagaatttctgcttctgggcagtgatggctgggctgacaggtatgatgtgacagatggatatcagcgagaagctgttggtggcatcacaatcaagctccaatctcccgatgtcaagtggtttgatgattattatctgaagctccggccagaaacaaaccaccgaaacccttggtttcaagaattttggcagcatcgttttcagtgccgactggaagggtttccacaggagaacagcaaatacaacaagacttgcaatagttctctgactctgaaaacacatcatgttcaggattccaaaatgggatttgtgatcaacgccatctattcgatggcctatgggctccacaacatgcagatgtccctctgcccaggctatgcaggactctgtgatgccatgaagccaattgatggacggaaacttttggagtccctgatgaaaaccaattttactggggtttctggagatacgatcctattcgatgagaatggagactctccaggaaggtatgaaataatgaatttcaaggaaatgggaaaagattactttgattatatcaacgttggaagttgggacaatggagaattaaaaatggatgatgatgaagtatggtccaagaaaagcaacatcatcagatctgtgtgcagtgaaccatgtgagaaaggccagatcaaggtgatccgaaagggagaagtcagctgttgttggacctgtacaccttgtaaggagaatgagtatgtctttgatgagtacacatgcaaggcatgccaactggggtcttggcccactgatgatctcacaggttgtgacttgatcccagtacagtatcttcgatggggtgaccctgaacccattgcagctgtggtgtttgcctgccttggcctcctggccaccctgtttgttactgtagtcttcatcatttaccgtgatacaccagtagtcaagtcctcaagcagggaactctgctacattatccttgctggcatctgcctgggctacttatgtaccttctgcctcattgcgaagcccaaacagatttactgctaccttcagagaattggcattggtctctccccagccatgagctactcagcccttgtaacaaagaccaaccgtattgcaaggatcctggctggcagcaagaagaagatctgtaccaaaaagcccagattcatgagtgcctgtgcccagctagtgattgctttcattctcatatgcatccagttgggcatcatcgttgccctctttataatggagcctcctgacataatgcatgactacccaagcattcgagaagtctacctgatctgtaacaccaccaacctaggagttgtcactccacttggatacaatggattgttgattttgagctgcaccttctatgcgttcaagaccagaaatgttccagctaacttcaacgaggccaagtatatcgccttcacaatgtacacgacctgcattatatggctagcttttgtgccaatctactttggcagcaactacaaaatcatcaccatgtgtttctcggtcagcctcagtgccacagtggccctaggctgcatgtttgtgccgaaggtgtacatcatcctggccaaaccagagagaaacgtgcgcagcgccttcaccacatctaccgtggtgcgcatgcatgtaggggatggcaagtcatcctccgcagccagcagatccagcagcctagtcaacctgtggaagagaaggggctcctctggggaaaccttaagttccaatggaaaatccgtcacgtgggcccagaatgagaagagcagccgggggcagcacctgtggcagcgcctgtccatccacatcaacaagaaagaaaaccccaaccaaacggccgtcatcaagcccttccccaagagcacggagagccgtggcctgggcgctggcgctggcgcaggcgggagcgctgggggcgtgggggccacgggcggtgcgggctgcgcaggcgccggcccaggcgggcccgagtccccagacgccggccccaaggcgctgtatgatgtggccgaggctgaggagcacttcccggcgcccgcgcggccgcgctcaccgtcgcccatcagcacgctgagccaccgcgcgggctcggccagccgcacggacgacgatgtgccgtcgctgcactcggagcctgtggcgcgcagcagctcctcgcagggctccctcatggagcagatcagcagtgtggtcacccgcttcacggccaacatcagcgagctcaactccatgatgctgtccaccgcggcccccagccccggcgtcggcgccccgctctgctcgtcctacctgatccccaaagagatccagttgcccacgaccatgacgacctttgccgaaatccagcctctgccggccatcgaagtcacgggcggcgcgcagcccgcggcaggggcgcaggcggctggggacgcggcccgggagagccccgcggccggtcccgaggctgcggccgccaagccagacctggaggagctggtggctctcaccccgccgtcccccttcagagactcggtggactcggggagcacaacccccaactcgccagtgtccgagtcggccctctgtatcccgtcgtctcccaaatatgacactcttatcataagagattacactcagagctcctcgtcgttgtgaatgtccctggaaagcacgccggcctgcgcgtgcggagcggagccccccgtgttcacacacacacaatggcaagcatagtcgcctggttacggcccagggggaatatgccaagggaccccttaatggaaacacagatcagtagtgctatctcatgacaaccacaagaaaccgacgacaaatcttttgcgagattttcttctagtggcttagaaacatggcttttaagaaacacggtgatatctttgagggtgacaaggcgtctcttcaaacagttccataccaactgctttgctctagggaagcagtgcgtgtgaaacagcgtaacggagggtgaagagcatagttaataagcaactgtaaaaagttttatttgtttactttaattcttttcccctgtaaaaagttttatttgtttactttaattcttttcccagaaaagagtctttgattcaccaaacatgaatgtacattttctaacaaactcaaaatctgggaccaaaacatcaacttttttctttcttttttctttctttttgttttttctttcctgtaaagaccttgaaaagaccttgaaaagcagtaacttgggtccagtatttacggaggcgttgtgaatgtgtcccatgcataacacactactggatagtgagtcgtgcgctaatgtactacgtagggcttctaccagagattttcctctccaattgggttgtgaaatactcttccaaaagcctgcatcggggattccacctacttatttcagattcacctccattaaccaagaaaaccagtggaagatttcttgactatttcaccatgttgccaatc

SEQ ID NO: 245 - DNA, 3495 bp, Homo Sapiens
ccagtctgcggaccgttcggagcaacgtggcggcccttgcccgccagcaatgcctaggagcagccaagcagggacccgtcggaaacccttcatccagcctttctctggcgcatggagaacctgggggtcggcgaaggggcagaggcttgcagcaggttgagtcgctctcgcggccgccacagcatgaccagagccccgaagcacctgtggcggcaaccccggcgccccatccgcatccaacagcgcttctattcggatccggacaagtccgcgggctgccgcgagagggacctgagcccgcggccggagctcaggaagtcgcggctctcctggcccgtttcctcctgcaggcgctttgacctggaaaatgggctctcgtgtgggaggagggccctggaccctcagtccagccctggcctgggccggattatgcaggctccagtcccgcacagccagcggcgcgagtccttcctgtaccgctcagatagcgactatgaactctcgcccaaggccatgtctcggaactcctctgtggccagcgacctacatggagaggacatgattgtgacgccctttgcccaggtcctggccagtctgcggaccgttcggagcaacgtggcggcccttgcccgccagcaatgcctaggagcagccaagcagggacccgtcggaaacccttcatccagcaatcagctccctcctgcagaggacacggggcagaagctggcattggagacgctagacgagctggactggtgcctggatcagttggagacgctgcagacccggcactcggtgggggagatggcctccaacaagttcaagcggatcctgaaccgggagttgacccacctgtccgaaaccagccgctccgggaaccaggtgtccgagtacatctcccggaccttcctggaccagcagaccgaggtggagctgcccaaggtgaccgctgaggaggccccacagcccatgtcccggatcagtggcctacatgggctctgccacagtgccagcctctcctcagccactgtcccacgctttggggtccagactgaccaggaggagcaactggccaaggagctagaagacaccaacaagtggggacttgatgtgttcaaggtggcggacgtaagtgggaaccggcccctcacagctatcatattcagcatttttcaggagcgggacctgctgaagacattccagatcccagcagacacactggccacctacctgctgatgctggagggtcactaccacgccaatgtggcctaccacaacagcctacatgccgccgacgtggcccagtccacgcatgtgctgctggctacgcccgccctcgaggctgtgttcacagacttggaaatcctggctgccctctttgcaagcgccatccacgacgtggaccatcctggggtctccaaccagtttctgattaacaccaactcagacgtggcgcttatgtacaacgacgcctcggtgctggagaaccatcacctggctgtgggcttcaagctgctgcaggcagagaactgcgatatcttccagaacctcagcgccaagcagcgactgagtctgcgcaggatggtcattgacatggtgctggccacagacatgtccaaacacatgaacctcctggccgacctcaagaccatggtggagaccaagaaggtgacaagcctcggtgtcctcctcctggacaactattccgaccgaatccaggtcttgcagaacctggtgcactgtgctgatctgagcaaccccaccaagccgctgcccctgtaccgccagtggacggaccgcatcatggccgagttcttccagcagggagaccgcgagcgtgagtcgggcctggacatcagtcccatgtgtgacaagcatacggcctcagtggagaagtcccaggtgggtttcattgactacattgctcacccactgtgggagacttgggctgacctggtccacccagatgcacaggacctgctggacacgctggaggacaatcgagagtggtaccagagcaagatcccccgaagtccctcagacctcaccaaccccgagcgggacgggcctgacagattccagtttgaactgactctggaggaggcagaggaagaggatgaggaggaagaagaggagggggaagagacagctttagccaaagaggccttggagttgcctgacactgaactcctgtcccctgaagccggcccagaccctggggacttacccctcgacaaccagaggacttagggccagccctgcgtgaactgcaggggcaatggatggtaaagccctttggctcttggcaggcagactttccaggaagaggctccatgtggctcctgcttcactttcccacccatttagggagacaatcaagctcttagttataggtggctcccagggtctaattggaggcacctggctggggtccactctgaccctagacttgcctaaaagagctctctaaggggcagcctcttacgatgccctggtgtctttctcctgggcttctatccctgtgaggagaggtgctgtctgctggagcctctagtccaccctctccagtggtcactcttgagtcacatctgtcacttaattatttccttctttatcaaatatttattgctcatctacttcgggccagctttctgcctctgtagtagccctgcacaaagggtggggagtcaggagaccatcccaaaggcatctccctgtcttcctctaccaagcggctctctgcaagagcatggaaatgtgagtggggaaaattttcagcaccaaagcttcactcatacccagttttgtttctgaaactacggtagggggcaggaagaggagcagaaaagaagggctgggcaaggcatagtggcttatgcctgtaatcccggtactttgggaggctgaggtgggaggactgcttaagctcaggagtttgagaccagcctgggcaacatagcaagacccccaccatctctgaaaaaaaaaattagccaggcatggtggtgtgcacctgagaatcccagctactcagaaggttgagacaaaggggatcgcttgagcccaggagttggaggctgaagagagctatgactgcatcactgcactccagcctgggcaacacagcaagatcctgtctaaaaataaaaagaaaagagaaggaaaggaaagagacggggctctgaggccgagcacagtggcccatgcctataatcccagcactttgggaggctgaggcaggtggatcacctgaggttaggagttcgagaccagcctggccaacatggtgaaaccccatctctactaaaaatacaaaaattggctgggcatggtggcgggtgcctgtaatcccagctactggggaggctgaggcaggagaatcacttgaattcaggaggtggaggttgcagtgagccgacatcatgccactgcactccagcctggggctgacagagcaagacactgtctcaaaaaagaaaaaaaaaaaaaaaaaaa

SEQ ID NO: 246 - DNA, 3568 bp, Homo Sapiens
ccggtcctgagacacgctgtgtggctgaaaagtgaaggcaagagctcatttggcctctgtgctcccctccgcaagggatcgtttctccagaagagctggatattctttcgcccagttatggcagacaagttaacgagaattgctattgtcaaccatgacaaatgtaaacctaagaaatgtcgacaggaatgcaaaaagagttgtcctgtagttcgaatgggaaaattatgcatagaggttacaccccagagcaaaatagcatggatttccgaaactctttgtattggttgtggtatctgtattaagaaatgcccctttggcgccttatcaattgtcaatctaccaagcaacttggaaaaagaaaccacacatcgatattgtgccaatgccttcaaacttcacaggttgcctatccctcgtccaggtgaagttttgggattagttggaactaatggtattggaaagtcagctgctttaaaaattttagcaggaaaacaaaagccaaaccttggaaagtacgatgatcctcctgactggcaggagattttgacttatttccgtggatctgaattacaaaattactttacaaagattctagaagatgacctaaaagccatcatcaaacctcaatatgtagccagattcctaaggctggcaaaggggacagtgggatctattttggaccgaaaagatgaaacaaagacacaggcaattgtatgtcagcagcttgatttaacccacctaaaagaacgaaatgttgaagatctttcaggaggagagttgcagagatttgcttgtgctgtcgtttgcatacagaaagctgatattttcatgtttgatgagccttctagttacctagatgtcaagcagcgtttaaaggctgctattactatacgatctctaataaatccagatagatatatcattgtggtggaacatgatctaagtgtattagactatctctccgacttcatctgctgtttatatggtgtaccaagcgcctatggagttgtcactatgccttttagtgtaagagaaggcataaacatttttttggatggctatgttccaacagaaaacttgagattcagagatgcatcacttgtttttaaagtggctgagacagcaaatgaagaagaagttaaaaagatgtgtatgtataaatatccaggaatgaagaaaaaaatgggagaatttgagctagcaattgtagctggagagtttacagattctgaaattatggtgatgctgggggaaaatggaacgggtaaaacgacatttatcagaatgcttgctggaagacttaaacctgatgaaggaggagaagtaccagttctaaatgtcagttataagccacagaaaattagtcccaaatcaactggaagtgttcgccagttactacatgaaaagataagagatgcttatactcacccacaatttgtgaccgatgtaatgaagcctctgcaaattgaaaacatcattgatcaagaggtgcagacattatctggtggtgaactacagcgagtacgtttacgcctttgcttgggcaaacctgctgatgtctatttaattgatgaaccatctgcatatttggattctgagcaaagactgatggcagctcgagttgtcaaacgtttcatactccatgcaaaaaagacagcctttgttgtggaacatgacttcatcatggccacctatctagcggatcgcgtcatcgtttttgatggtgttccatctaagaacacagttgcaaacagtcctcaaacccttttggctggcatgaataaatttttgtctcagcttgaaattacattcagaagagatccaaacaactataggccacgaataaacaaacttaattcaattaaggatgtagaacaaaagaagagtggaaactactttttcttggatgattagactgactctgagaatattgataagccatttattaaaaggagtatttactagaattttttgtcatataaaacttgaatcaggattttatgccccacatactctggaacttgaagtataatatacttaatataacataaaaagccagttgggttctaaattgtagttgaaacacagaaaatgccacttttctgttcctgaagaggctcttttgtgcataatattctaaaatgaagacatttcaagctatacaaattacttccaagttttcatgatgtatgggaagattttcagtaggtgtattatattcacggtaccaaatgctgaccagtgttgctccattttttaaatcttgaaaagggtttctgtacttacctggtttgccaagtatgccagtgtaatgaaactgcccttattttaaaagccagtcaaagattccactgattgacatttgataaataaacatcaggattatgtttattgtttgttttcagtctttgcactatattaccagtatatggtttccgaggaagattatctactgcaaaacaccactgttggaaaaataggtatttttaaattgtttttaatccttttttggtgcttttaaacatgtttaagcaaaaaccaattcagtccattccccgcaaaaaacccctaactttactctgaactttttttgtttttgcattccatgaggttctgtattcagtcattctctaggtaatgtcatttttgtacacatatatttatataatcactgattgagatttaggaaaaagcatttctaaagaatatttgcttcccttagaactacagactcgaaatctttaaagatggtgcctaagcatctatgtattttttttaagttccacagatttttctgttgggcaggccaaggattataaaccacttccctaaaggcaacattaatgcaaaagtccccagatggcaatacaaagtatcccctggtaccacatatattcatttgtgagtttggatatagagcacattatctaaaccattttgtagttccaaaaacccatctaaatttcttgagttcctgaattttgaacaggattacctggagcctggagccactttaagttgtacttctgactaaactggaattatgagtgaggaagagtgtttactaaataaatgactggggcaagcaaaattgaggaggaaattagaaactgtttgacaaactttaagagctacttgaaataacagaagtcttgattaatatgcaaataatggctagaaagtatggtttaactggaccctattatgccttttaaaaataatttcagtaacccataaatacatgttgtaaaaaattcaaatatacagaatggaataaaaaaatgatctccctttattaccctcccaaaggttaccagcgtttgaatttaataatgtatattctttcatgcttttttctgtgcacttacctaagtgtgaatatgtaaagggtttgttttgtatacaaatgggattatactaaaataagtaatgcctatttttaaggataggttaaatttgtgaatgatcatttcaaatatattgaataaaataagcaaaagctattgttatttactgatcctgaaaaaaaaaaaaaaaaaaaaaaaaaaaaaaaaaaaaaaaaaaa

SEQ ID NO: 247 - DNA, 1125 bp, Homo Sapiens
cccccatgtgacagtgacggggtccccgctccaggagacgctcgagtctgcgtcccggccctcagcactgtccactgtttcggtgccagcagagaccagcaggcccgggacagttggtgtttggccgtgccgctgtctaacttggtgtgcagagtgaattgccgctgccggagcggagagaggcggagcggccaggagagaggggatttctgtcagcgccggcctcgggagctcggagacatgaacggcttcacgcctgacgagatgagccgcggcggggatgcggccgccgcagtggccgcagtggtcgctgccgcggccgccgccgcctcggcggggaacgggaccggcgcgggcaccggggctgaggtgccgggcgcgggggcggtctcagcggctgggcccccgggggcggccgggccgggccccgggcaactgtgctgcctgcgggaggatggtgagcggtgcggccgggcggcaggcaacgccagcttcagcaagaggatccagaagagcatctcccagaagaaggtgaagatcgagctggataagagcgcaaggcatctttacatatgtgattatcataaaaacttaattcagagtgttcgaaacagaagaaagagaaaagggagtgatgatgatggaggtgattcacctgttcaagatattgataccccagaggttgatttataccaattacaagtaaatacacttaggagatacaaaagacacttcaagctaccaaccagaccaggacttaataaagcacaacttgttgagatagttggttgccactttaggtctattccagtgaatgaaaaagacaccttaacatatttcatctactcagtgaagaatgacaagaacaaatcagatctcaaggttgatagtggtgttcactaggagacgtggaattgagactaataacttggatgttaacactgtttactgttttttcacatgtagaaatgttctttgtgtattttttctacagaggattttctctgattttattttctttgtttctgactctaataattagttggaaactcatataaaatgagctttcctaaattaaatctattttaaataaaggttattactattaaaaaaaaaaaaaaaaaa

SEQ ID NO: 248 - DNA, 1404 bp, Homo Sapiens
gccgggcagccatggctgagacactcttctggactcctctcctcgtggttctcctggcagggctgggggacaccgaggcccagcagaccacgctacacccacttgtgggccgtgtctttgtgcacaccttggaccatgagacgtttctgagccttcctgagcatgtcgctgtcccacccgctgtccacatcacctaccacgcccacctccagggacacccagacctgccccggtggctccgctacacccagcgcagcccccaccaccctggcttcctctacggctctgccaccccagaagatcgtgggctccaggtcattgaggtcacagcctacaatcgggacagctttgataccactcggcagaggctggtgctggagattggggacccagaaggccccctgctgccataccaagccgagttcctggtgcgcagccacgatgcggaggaggtgctgccctcaacacctgccagccgcttcctctcagccttggggggactctgggagcccggagagcttcagctgctcaacgtcacctctgccttggaccgtgggggccgtgtcccccttcccattgagggccgaaaagaaggggtatacattaaggtgggttctgcctcacctttttctacttgcctgaagatggtggcatcccccgatagccacgcccgctgtgcccagggccagcctccacttctgtcttgctacgacaccttggcaccccacttccgcgttgactggtgcaatgtgaccctggtggataagtcagtgccggagcctgcagatgaggtgcccaccccaggtgatgggatcctggagcatgacccgttcttctgcccacccactgaggccccagaccgtgacttcttggtggatgctctggtcaccctcctggtgcccctgctggtggccctgcttctcaccttgctgctggcctatgtcatgtgctgccggcgggagggaaggctgaagagagacctggctacctccgacatccagatggtccaccactgcaccatccacgggaacacagaggagctgcggcagatggcggccagccgcgaggtgccccggccactctccaccctgcccatgttcaatgtgcacacaggtgagcggctgcctccccgcgtggacagcgcccaggtgcccctcattctggaccagcactgacagcccagccagtggttccaggtccagccctgacttcatcctcccttctctgtccacaccacgagtggcacatcccacctgctgattccagctcctggccctcctggaacccaggctctaaacaagcagggagagggggtggggtggggtgagagtgtgtggagtaaggacattcagaataaatatctgctgctctgctcaccaattgctgctggcagcctctcccgtc

SEQ ID NO: 249 - DNA, 5027 bp, Homo Sapiens
aaagcgacaccttctacgctgggtggccagtttccatgtggcttgrtgtgggagcagagacgggacagtggggcctgtccttgttcatccactccctgcctgtgctggttgcagcctcagagcaggcgggagatgttcttggggcttaggctcctggcagagcacatagcaggagtttgtggggtctgaggttcctgtcccagggttccccgattctgtgcctggcctattaatctttctcyggggagcccagtgcccactgccgagcaggctcctgccatcccccatgggcgggtgtgtctgaaggagaatgggatcccggcacggtcttggtttctaacatctcggggtgtgttttggaggcaggcgggagtcatggatgtagatgctgaaagagagaagataacacaggagatcaaggagctggaaaggattttggatcccggctcctcgggctcccacgtggagatctcagaatcaagtctcgagtcagattctgaagcagattcactgccttctgaggacttggatcctgccgatcccccgatctcggaagaagaaaggtggggcgaagccagcaatgacgaggacgatcccaaggataaaaccctccctgaagacccagaaacctgcctgcagctgaacatggtctaccaggaggtcatccaggagaagctggctgaggccaacctgctgctggcccagaaccgggagcagcaggaggaactcatgagggatctggctgggtccaaaggcaccaaggtgaaagacggcaaaagcctgcccccaagcacatacatggggcacttcatgaagccgtatttcaaggacaaggtcacgggcgtggggccacctgccaacgaggacacacgagagaaggctgcccaggggatcaaggctttcgaggagctccttgtgaccaaatggaaaaactgggaaaaggccttgctccgaaagtcagtggtgagtgaccgcctgcagcgattgcttcagcccaagttactgaagctcgagtacttgcaccagaagcagagcaaagtctccagtgagctggagaggcaagccctggagaagcagggcagggaagccgagaaggagatccaggacatcaaccagcttccagaagaggccttgctgggaaacaggctggacagccacgactgggagaagatttccaatattaactttgaaggcagccgcagtgcagaggagatccggaagttctggcagaactcggagcaccccagcatcaacaagcaggagtggagcagggaggaggaggagcggctgcaggcgatcgcggctgcacacggccacctggagtggcagaagattgcagaggagctggggaccagccgcagcgccttccagtgcctgcagaaattccagcagcacaacaaagctctgaaacgcaaggagtggacagaggaggaggaccgcatgctcacgcagctggtgcaggagatgcgcgtcggcagccacatcccctaccgcagaattgtctactatatggaagggagagactccatgcagctgatctaccgatggaccaagagcttggatcctggtctgaagaagggttactgggccccggaggaagatgctaagttgcttcaagctgttgccaaatacggggagcaggattggtttaaaatccgggaagaggtgccaggtaggagcgatgcccagtgccgagatcggtatctcaggagattacatttcagcttgaaaaagggtcggtggaatttaaaagaagaggaacagttaattgaattaatagaaaaatatggtgtcggtcactgggcaaaaatagcttctgagctgccccatcggtctggctcccagtgtctgagcaagtggaagatcatgatggggaagaagcagggtctccggaggcggcggcggagggcccgtcacagcgtccggtggagctctaccagcagcagcggcagcagcagtggcagcagtggagggagcagcagcagcagcagcagcagcagcgaggaggacgagccagagcaggcgcaggccggggagggtgacagagcgctgctgtccccacagtacatggtcccggacatggacctgtgggttcctgccaggcagagcaccagccagccatggagaggaggggcaggggcctggctgggaggccccgctgcctccctcagccctcccaaggggtccagtgccagccagggcggcagcaaggaagcttccaccacagccgcggctcctggagaggagacgagtccggtgcaggtccctgccagggcccacggccctgtcccgaggtctgcccaggcctcccactcagcagacactcgcccggcgggcgcagagaagcaggccctggagggtgggaggcgtctgctgacagtgcctgtggagaccgtgctgagggtgctcagggccaacacggctgctcggagctgcacacagaaagagcagctgaggcagccacccctgcccacctcatccccaggggtcagctctggtgacagcgtggcccgatcccatgtgcagtggctacggcacagagccacccagagtgggcagcggcgctggagacacgctctgcaccggaggctcctgaaccgcaggctgctgctggctgtgaccccttgggtaggggacgttgtcgtgccctgcacacaggcttcccagagacccgccgtagtgcagactcaagcggatggcctcagggagcagctgcagcaggcccgcctggccagcacccctgtgtttaccctgtttacccagctgttccacatcgatactgccggctgcttggaggtcgtccgagagaggaaggccctgccacccaggctgccccaggctggtgctcgggacccaccagttcatcttctgcaggcatcctcaagtgcccagagcaccccaggccacctcttcccaaacgtgccggctcaagaagcctcaaagagtgccagccacaaagggagccgaagactggcgtccagccgggtggagcgcaccctaccccaggcgtccctgctggcttcaaccggcccccggcccaagcccaagactgtgtcggagctgcttcaggagaagcggcttcaggaggcccgtgccagggaggccacccggggcccggtggtgctcccgtcccagctgctggtctcctcgtctgtgatcctccagccccctctaccacacaccccacacggccgcccagccccgggtcccaccgtcttaaatgtaccgctctctgggcctggggcccccgcagcagccaaacctggcacttctggctcctggcaggaggctgggacttcagccaaggacaagagactctccaccatgcaagccctgcccctcgctcctgtcttctcagaggccgaaggcacagcccctgctgcttcccaagcccctgccctgggccccggccagatctctgtgagctgccccgagagtggtctcggacagtctcaggcccccgctgcatcccggaagcagggcctgcctgaggcgccaccctttctccccggagcccccagccccaccccactgcccgtccagcccctcagcctgacgcacataggagggccacatgtggcgaccagtgtccccctgcctgtcacctgggtgctcacagcccaggggcttctccctgttcctgtaccagctgtggtgagccttcccaggccagcagggacccctggccccgcagggctgctggccactctgctgcctcccctgactgagactcgggcggcccagggccccagggccccagcgttgagcagctcttggcagcccccagccaatatgaacagggaaccggagccttcctgcaggacagacaccccagctcctcccacacacgccctctcccaaagtcctgcagaagcggatggcagtgtggcctttgtccctggagaggcccaggtggccagggagatacctgagcccaggacgtcctcccacgctgaccctcctgaagcagaacccccttggtccgggaggctgccagccttcggtggtgtcatcccagcaactgagccaagggggacgccggggtccccctcagggacacaggagcccagggggcctctgggcctggagaagctgcccctgcgccagcctgggcctgagaagggggccctggacctggagaagccgcccctaccccagcctgggcctgagaagggggccctggacctgggcctgctgtcccaggagggcgaggcagccacacagcagtggctggggggccagcggggggtgcgtgtgcctcttctgggcagcagactgccctatcagcccccagccctgtgcagcctgcgagctctgtccggtctcctactccacaagaaggccctggagcacaaggccacctccctggtggtggggggcgaggctgagcggccggccggagcactgcaagcctcactggggctggtgcgggggcagctccaggacaacccggcctacctcctgttgcgggcgcggttcctggcagccttcaccctccctgcgctcctggccaccctggccccccaaggcgtccgcaccaccctctcagtaccttcgagggtgggctctgagagtgaggatgaagacctcctgagtgagctggaacttgcagacagggacgggcagccgggctgcacgacagccacatgccccattcagggagccccagactctggtaaatgctctgcttcctcctgcctggatacttctaatgaccctgacgacctggacgtgctcagaacccggcatgccaggcacacccggaagcggaggcggctggtgtgagcagcaggacaagcactttctcagaagcccgtggccctgctgacgagagacagcccacccccagcctgcaagagaggcagccagaggccaggtatctgctggccgctgactgaccaggtccgcagtgaacagaggcgggcctgccgactgactgtgtggcatggagcatggctgttccccaagtgcacacctgaacacttggaggaataaagttctgtttttaattgtggaaaaaaaaaaaa

SEQ ID NO: 250 - DNA, 2500 bp, Homo Sapiens
cggggggatcttggctgtgtgtctgcggatctgtagtggcggcggcggcggcggcggcggggaggcagcaggcgcgggagcgggcgcaggagcaggcggcggcggtggcggcggcggttagacatgaacgccgcctcggcgccggcggtgcacggagagccccttctcgcgcgcgggcggtttgtgtgattttgctaaaatgcatcaccaacagcgaatggctgccttagggacggacaaagagctgagtgatttactggatttcagtgcgatgttttcacctcctgtgagcagtgggaaaaatggaccaacttctttggcaagtggacattttactggctcaaatgtagaagacagaagtagctcagggtcctgggggaatggaggacatccaagcccgtccaggaactatggagatgggactccctatgaccacatgaccagcagggaccttgggtcacatgacaatctctctccaccttttgtcaattccagaatacaaagtaaaacagaaaggggctcatactcatcttatgggagagaatcaaacttacagggttgccaccagcagagtctccttggaggtgacatggatatgggcaacccaggaaccctttcgcccaccaaacctggttcccagtactatcagtattctagcaataatccccgaaggaggcctcttcacagtagtgccatggaggtacagacaaagaaagttcgaaaagttcctccaggtttgccatcttcagtctatgctccatcagcaagcactgccgactacaatagggactcgccaggctatccttcctccaaaccagcaaccagcactttccctagctccttcttcatgcaagatggccatcacagcagtgacccttggagctcctccagtgggatgaatcagcctggctatgcaggaatgttgggcaactcttctcatattccacagtccagcagctactgtagcctgcatccacatgaacgtttgagctatccatcacactcctcagcagacatcaattccagtcttcctccgatgtccactttccatcgtagtggtacaaaccattacagcacctcttcctgtacgcctcctgccaacgggacagacagtataatggcaaatagaggaagcggggcagccggcagctcccagactggagatgctctggggaaagcacttgcttcgatctattctccagatcacactaacaacagcttttcatcaaacccttcaactcctgttggctctcctccatctctctcagcaggcacagctgtttggtctagaaatggaggacaggcctcatcgtctcctaattatgaaggacccttacactctttgcaaagccgaattgaagatcgtttagaaagactggatgatgctattcatgttctccggaaccatgcagtgggcccatccacagctatgcctggtggtcatggggacatgcatggaatcattggaccttctcataatggagccatgggtggtctgggctcagggtatggaaccggccttctttcagccaacagacattcactcatggtggggacccatcgtgaagatggcgtggccctgagaggcagccattctcttctgccaaaccaggttccggttccacagcttcctgtccagtctgcgacttcccctgacctgaacccaccccaggacccttacagaggcatgccaccaggactacaggggcagagtgtctcctctggcagctctgagatcaaatccgatgacgagggtgatgagaacctgcaagacacgaaatcttcggaggacaagaaattagatgacgacaagaaggatatcaaatcaattactagcaataatgacgatgaggacctgacaccagagcagaaggcagagcgtgagaaggagcggaggatggccaacaatgcccgagagcgtctgcgggtccgtgacatcaacgaggctttcaaagagctcggccgcatggtgcagctccacctcaagagtgacaagccccagaccaagctcctgatcctccaccaggcggtggccgtcatcctcagtctggagcagcaagtccgagaaaggaatctgaatccgaaagctgcgtgtctgaaaagaagggaggaagagaaggtgtcctcggagcctccccctctctccttggccggcccacaccctggaatgggagacgcatcgaatcacatgggacagatgtaaaagggtccaagttgccacattgcttcattaaaacaagagaccacttccttaacagctgtattatcttaaacccacataaacacttctccttaacccccatttttgtaatataagacaagtctgagtagttatgaatcgcagacgcaagaggtttcagcattcccaattatcaaaaaacagaaaaacaaaaaaaagaaagaaaaaagtgcaacttgagggacgactttctttaacatatcattcagaatgtgcaaagcagtatgtacaggctgagacacagcccagagactgaacggc

SEQ ID NO: 251 - DNA, 2574 bp, Homo Sapiens
cctgtttagacacatggacaacaatcccagcgctacaaggcacacagtccgcttcttcgtcctcagggttgccagcgcttcctggaagtcctgaagctctcgcagtgcagtgagttcatgcaccttcttgccaagcctcagtctttgggatctggggaggccgcctggttttcctccctccttctgcacgtctgctggggtctcttcctctccaggccttgccgtccccctggcctctcttcccagctcacacatgaagatgcacttgcaaagggctctggtggtcctggccctgctgaactttgccacggtcagcctctctctgtccacttgcaccaccttggacttcggccacatcaagaagaagagggtggaagccattaggggacagatcttgagcaagctcaggctcaccagcccccctgagccaacggtgatgacccacgtcccctatcaggtcctggccctttacaacagcacccgggagctgctggaggagatgcatggggagagggaggaaggctgcacccaggaaaacaccgagtcggaatactatgccaaagaaatccataaattcgacatgatccaggggctggcggagcacaacgaactggctgtctgccctaaaggaattacctccaaggttttccgcttcaatgtgtcctcagtggagaaaaatagaaccaacctattccgagcagaattccgggtcttgcgggtgcccaaccccagctctaagcggaatgagcagaggatcgagctcttccagatccttcggccagatgagcacattgccaaacagcgctatatcggtggcaagaatctgcccacacggggcactgccgagtggctgtcctttgatgtcactgacactgtgcgtgagtggctgttgagaagagagtccaacttaggtctagaaatcagcattcactgtccatgtcacacctttcagcccaatggagatatcctggaaaacattcacgaggtgatggaaatcaaattcaaaggcgtggacaatgaggatgaccatggccgtggagatctggggcgcctcaagaagcagaaggatcaccacaaccctcatctaatcctcatgatgattcccccacaccggctcgacaacccgggccaggggggtcagaggaagaagcgggctttggacaccaattactgcttccgcaacttggaggagaactgctgtgtgcgccccctctacattgacttccgacaggatctgggctggaagtgggtccatgaacctaagggctactatgccaacttctgctcaggcccttgcccatacctccgcagtgcagacacaacccacagcacggtgctgggactgtacaacactctgaaccctgaagcatctgcctcgccttgctgcgtgccccaggacctggagcccctgaccatcctgtactatgttgggaggacccccaaagtggagcagctctccaacatggtggtgaagtcttgtaaatgtagctgagaccccacgtgcgacagagagaggggagagagaaccaccactgcctgactgcccgctcctcgggaaacacacaagcaacaaacctcactgagaggcctggagcccacaaccttcggctccgggcaaatggctgagatggaggtttccttttggaacatttctttcttgctggctctgagaatcacggtggtaaagaaagtgtgggtttggttagaggaaggctgaactcttcagaacacacagactttctgtgacgcagacagaggggatggggatagaggaaagggatggtaagttgagatgttgtgtggcaatgggatttgggctaccctaaagggagaaggaagggcagagaatggctgggtcagggccagactggaagacacttcagatctgaggttggatttgctcattgctgtaccacatctgctctagggaatctggattatgttatacaaggcaagcatttttttttttaaagacaggttacgaagacaaagtcccagaattgtatctcatactgtctgggattaagggcaaatctattacttttgcaaactgtcctctacatcaattaacatcgtgggtcactacagggagaaaatccaggtcatgcagttcctggcccatcaactgtattgggccttttggatatgctgaacgcagaagaaagggtggaaatcaaccctctcctgtctgccctctgggtccctcctctcacctctccctcgatcatatttccccttggacacttggttagacgccttccaggtcaggatgcacatttctggattgtggttccatgcagccttggggcattatgggtcttcccccacttcccctccaagaccctgtgttcatttggtgttcctggaagcaggtgctacaacatgtgaggcattcggggaagctgcacatgtgccacacagtgacttggccccagacgcatagactgaggtataaagacaagtatgaatattactctcaaaatctttgtataaataaatatttttggggcatcctggatgatttcatcttctggaatattgtttctagaacagtaaaagccttattctaaggtg

SEQ ID NO: 252 - DNA, 2709 bp, Homo Sapiens
gggtcctgtcccatccatcctgacctgttccatctcagccccaggactcagtactgcggttgccaacactgctgccaggcatgatggatgggccacgttccgatgtgggccgttggggtggcaaccccttgcagccccctaccacgccatctccagagccagagccagagccagacggacgctctcgcagaggaggaggccgttccttctgggctcgctgctgtggctgctgttcatgccgaaatgcggcagatgacgactggggacctgaaccctctgactccaggggtcgagggtccagctctggcactcgaagacctggctcccggggctcagactcccgccggcctgtatcccggggcagcggtgtcaatgcagctggagatggcaccatccgagagggcatgctagtagtgaacggtgtggacttgctgagctcgcgctcggaccagaaccgccgagagcaccacacagacgagtatgagtacgacgagctgatagtgcgccgcgggcagcctttccatatgctcctcctcctgtcccggacctatgaatcctctgatcgcatcacccttgagttactcatcggaaacaaccccgaggtgggcaagggcacgcacgtgatcatcccagtgggcaaggggggcagtggaggctggaaagcccaggtggtcaaggccagtgggcagaatctgaacctgcgggtccacacttcccccaacgccatcatcggcaagtttcagttcacagtccgcacacaatcagacgctggggagttccagttgccctttgacccccgcaatgagatctacatcctcttcaacccctggtgcccagaggacattgtgtacgtggaccatgaggattggcggcaggagtatgttcttaatgagtctgggagaatttactacgggaccgaagcacagattggtgagcggacctggaactacggccagtttgaccacggggtgctggatgcctgcttatacatcctggaccggcgggggatgccatatggaggccgtggagacccagtcaatgtctcccgggtcatctctgccatggtgaactccctggatgacaatggagtcctgattgggaactggtctggtgattactcccgaggcaccaacccatcagcgtgggtgggcagcgtggagatcctgcttagctacctacgcacgggatattccgtcccctatggccagtgctgggtctttgctggagtgaccaccacagtgctgcgctgcctgggtctggccacccgtactgtcaccaacttcaactccgcccacgacacagacacatcccttaccatggacatctacttcgacgagaacatgaagcccctggagcacctgaaccatgattctgtctggaacttccatgtgtggaacgactgctggatgaagaggccggatctgccctcgggctttgatgggtggcaggtggtggatgccacaccccaagagactagcagtggcatcttctgctgcggcccctgctctgtggagtccatcaagaatggcctggtctacatgaagtacgacacgcctttcatttttgctgaggtgaatagtgacaaggtgtactggcagcggcaggatgatggcagcttcaagattgtttatgtggaggagaaggccatcggcacactcattgtcacaaaggccatcagctccaacatgcgggaggacatcacctacctctataagcacccagaaggctcagacgcagagcggaaggcagtagagacagcagcagcccacggcagcaaacccaatgtgtatgccaaccggggctcagcggaggatgtggccatgcaggtggaggcacaggacgcggtgatggggcaggatctgatggtctctgtgatgctgatcaatcacagcagcagccgccgcacagtgaaactgcacctctacctctcagtcactttctatactggtgtcagtggtaccatcttcaaggagaccaagaaggaagtggagctggcaccaggggcctcggaccgtgtgaccatgccagtggcctacaaggaataccggccccatcttgtggaccagggggccatgctgctcaatgtctcaggccacgtcaaggagagcgggcaggtgctggccaagcagcacaccttccgtctgcgcaccccagacctctccctcacgttactgggagcagcagtggttggccaggagtgtgaagtacagattgtcttcaagaacccccttcccgtcaccctcaccaatgtcgtcttccggctcgaaggctctgggttacagaggcccaagatcctcaacgttggggacattggaggcaatgaaacagtgacactgcgccagtcgtttgtgcctgtgcgaccaggcccccgccagctcattgccagcttggacagcccacagctctcccaggtgcacggtgtcatccaggtggatgtggccccagcccctggggatgggggcttcttctcagacgctggaggtgacagtcacttaggagagaccatccctatggcatctcgaggtggagcttagccctgtgccaggagcaatgggactggagtcagatgagcaaggacattgccccaagataggggcacactacagagcagctccccaggagctcaggtggggagtccagggctcccggagagggagtcagtcttcacttgcactgggggaacagatgctaataaactgttttttaatg

SEQ ID NO: 253 - DNA, 2665 bp, Homo Sapiens
agaaattcaggagacacagacaagttcttccacgatgtcgtacagacgagaactagagaaataccgtgacctggatgaagatgaaatccttggagccctaacagaggaagagctgaggaccctggaaaatgagctggatgagctggaccctgataatgcactgctgcctgcaggcctgaggcagaaggatcagaccaccaaggcgcccacgggcccctttaaaagagaggagctcttggatcacttggaaaagcaagcaaaggagtttaaggaccgagaagatctggtcccctacacaggggaaaaacgaggaaaggtctgggttcctaagcagaagccactggatcctgtgctggaaagtgtgacgctggaaccggagctggaggaagccttggcaaatgcttcagatgcagaactctgtgacattgcagcgatcctgggcatgcacacgctcatgagtaaccagcagtactaccaggccctgagcagcagctccatcatgaacaaggaggggctcaacagcgtgattaaacccacacaatacaagcctgtgcccgacgaagaaccaaattcaacagacgtagaggaaacgctggaacggataaagaacaacgacccaaaacttgaagaagttaacctcaataatatccggaatatccccatccccaccctcaaggcatatgcagaagccctgaaagaaaactcatatgtgaagaagttcagcatcgtggggacacggagtaatgaccccgtggcgtatgcccttgctgagatgctcaaggagaacaaggtgttgaagacactgaatgtggaatccaacttcatttctggagctgggattctgcgcctggtagaagccctcccatacaacacttctctggtggaaatgaaaattgacaaccagagccagcccctgggcaacaaagtggaaatggagattgtgagcatgttggaaaaaaacgcaacacttctcaaattcggctaccactttacccagcaaggaccccggcttcgggcatccaacgcaatgatgaacaacaatgaccttgtgaggaagaggaggcttgcggacctgactgggcccatcattcccaagtgccggagtggtgtctagtgtgtggcggtggagtccatgcctttgaactggatgtgttctattgatgacctgtgctctgcaggggaaaccagaaggcaaaatgctggcagcatgaaacccttttgtggttcagttctttatgcactaaggttttaggttgactagtggttgtagttgaaaattttataaaataccgttaatgtgaagtttttctttagtcacagaagttgaatctggttattatttaaaaactagaagcccccaaaccagcagatcttactgaagatgatgttccagcagcagcgacttagccccaggagcccagtttcaatggccttgctgtgtggtgtttcaagtgcatttaaaatgtgtgacacagaaacggcacactcttccacatgcttttgaagtattataaaacactttattacaaatttgtcttagctattagcaaataaaactgattatcattctttattaaccctccttggaattttgaaaacctcgattaaagttgccaaattgattactggatccagaacacaattttcccctcagaacagatagacagactgaagccactgaactctgccaggagtcaacatgagattccttttgctggatatgcagaaatgataggaaaaaaaccaatggtgaaatttcaagtttcaaaaaccaacctttcattaccaatcccaggcaacaaacatgtccctgagtgttctttaagaacatttgggatttatgtacaatttaatactggagttagaactttttccttattgaatgccaaccttatgatggatgtgaaaatctacggccaaatacttttgaaaacacctttctatattgcacagtgggcaaatggcttatgtgaggtaagacactagagggataaatttccagatcaacatggctatggtatttagtaatggcccagcttagagacttcagctactgatctcatcacttattagacaaattgctgctgaccttacgcctgtatattaagcctccgcaggatgccggacaatggtgaagaaactccagatatcaaggaattgggaaatcctggccaaaccaccccaagatgattacactgaaatgtagtattagtactgctgccagatctctttttaacatcatgtgcgtctcttgggatccagcaaaagtgttaagccacaatgcccttgtgccttttaatataccacagtgccagttaaactaatatttttgtttgttgcttttgggagttattttcattagtgatttcagcaaatctcatgataaaggacaaggtcaagaactccagagcactgagcagagaggctggtgatgaaaaggtgaaggcctgcgcactgaactgtaaggcagtgggcagtacagggtaactggaggcggggccagggcctcagcgctatggaagagtgtccactgaggctgcacatggcccaggagtggcaccatgttgcagggacaaccatccccatttggcttctccttaaaacacaattgcagctgcattctgcatcgctgaaaactgcaatataatattaaatctgttggtcg

SEQ ID NO: 254 - DNA, 2090 bp, Homo Sapiens
ttcggcacgagtaagaccaggatgtctctgaaatggacgtcagtctttctgctgatacagctcagttgttactttagctctggaagctgtggaaaggtgctagtgtggcccacagaatacagccattggataaatatgaagacaatcctggaagagcttgttcagaggggtcatgaggtgactgtgttgacatcttcggcttctactcttgtcaatgccagtaaatcatctgctattaaattagaagtttatcctacatctttaactaaaaatgatttggaagattctcttctgaaaattctcgatagatggatatatggtgtttcaaaaaatacattttggtcatatttttcacaattacaagaattgtgttgggaatattatgactacagtaacaagctctgtaaagatgcagttttgaataagaaacttatgatgaaactacaagagtcaaagtttgatgtcattctggcagatgcccttaatccctgtggtgagctactggctgaactatttaacataccctttctgtacagtcttcgattctctgttggctacacatttgagaagaatggtggaggatttctgttccctccttcctatgtacctgttgttatgtcagaattaagtgatcaaatgattttcatggagaggataaaaaatatgatacatatgctttattttgacttttggtttcaaatttatgatctgaagaagtgggaccagttttatagtgaagttctaggaagacccactacattatttgagacaatggggaaagctgaaatgtggctcattcgaacctattgggattttgaatttcctcgcccattcttaccaaatgttgattttgttggaggacttcactgtaaaccagccaaacccctgcctaaggaaatggaagagtttgtgcagagctctggagaaaatggtattgtggtgttttctctggggtcgatgatcagtaacatgtcagaagaaagtgccaacatgattgcatcagcccttgcccagatcccacaaaaggttctatggagatttgatggcaagaagccaaatacattaggttccaatactcgactgtacaagtggttaccccagaatgaccttcttggtcatcccaaaaccaaagcttttataactcatggtggaaccaatggcatctatgaggcgatctaccatgggatccctatggtgggcattcccttgtttgcggatcaacatgataacattgctcacatgaaagccaagggagcagccctcagtgtggacatcaggaccatgtcaagtagagatttgctcaatgcattgaagtcagtcattaatgaccctgtctataaagagaatgtcatgaaattatcaagaattcatcatgaccaaccaatgaagcccctggatcgagcagtcttctggattgagtttgtcatgcgccacaaaggagccaagcaccttcgagtcgcagctcacaacctcacctggatccagtaccactctttggatgtgatagcattcctgctggcctgcgtggcaactgtgatatttatcatcacaaaattttgcctgttttgtttccgaaagcttgccaaaacaggaaagaagaagaaaagagattagttatatcaaaagcctgaagtggaatgactgaaagatgggactcctcctttatttcagcatggagggttttaaatggaggatttcctttttcctgtgacaaaacatcttttcacaacttaccttgttaagacaaaatttattttccagggatttaatacgtactttagttggaattattctatgtcaatgatttttaagctatgaaaaatacaatggggggaaggatagcatttggagatatacctaatgttaaatgacgagttactggatgcagcacgcaacatggcacatgtgtatacatatgtagctaacccttcgttgtgcacatgtaccctaaaacttaaagtataatttaaaaaaagcaaaaaaaaaaaataccaactcttttttttaaaccaggaaggaaaatgtgaacatggaaacaacttctagtattggatctgaaaataaagtgtcatccaagccataaaaaaaaa

SEQ ID NO: 255 - DNA, 2244 bp, Homo Sapiens
ctgcagacgaggcagggagaggcgggacttcgcgggcgagacgtcatcggggcgccggacgccggggcgcctgggagtttgaagcaaacaggcagcgcgcgacaatggcggtcgctcgtgcagctttggggccattggtgacgggtctgtacgacgtgcaggctttcaagtttggggacttcgtgctgaagagcgggctttcctcccccatctacatcgatctgcggggcatcgtgtctcgaccgcgtcttctgagtcaggttgcagatattttattccaaactgcccaaaatgcaggcatcagttttgacaccgtgtgtggagtgccttatacagctttgccattggctacagttatctgttcaaccaatcaaattccaatgcttattagaaggaaagaaacaaaggattatggaactaagcgtcttgtagaaggaactattaatccaggagaaacctgtttaatcattgaagatgttgtcaccagtggatctagtgttttggaaactgttgaggttcttcagaaggagggcttgaaggtcactgatgccatagtgctgttggacagagagcagggaggcaaggacaagttgcaggcgcacgggatccgcctccactcagtgtgtacattgtccaaaatgctggagattctcgagcagcagaaaaaagttgatgctgagacagttgggagagtgaagaggtttattcaggagaatgtctttgtggcagcgaatcataatggttctcccctttctataaaggaagcacccaaagaactcagcttcggtgcacgtgcagagctgcccaggatccacccagttgcatcgaagcttctcaggcttatgcaaaagaaggagaccaatctgtgtctatctgctgatgtttcactggccagagagctgttgcagctagcagatgctttaggacctagtatctgcatgctgaagactcatgtagatattttgaatgattttactctggatgtgatgaaggagttgataactctggcaaaatgccatgagttcttgatatttgaagaccggaagtttgcagatataggaaacacagtgaaaaagcagtatgaaggaggtatctttaaaatagcttcctgggcagatctagtaaatgctcacgtggtgccaggctcaggagttgtgaaaggcctgcaagaagtgggcctgcctttgcatcgggggtgcctccttattgcggaaatgagctccaccggctccctggccactggggactacactagagcagcggttagaatggctgaggagcactctgaatttgttgttggttttatttctggctcccgagtaagcatgaaaccagaatttcttcacttgactccaggagttcagttggaagcaggaggagataatcttggccaacagtacaatagcccacaagaagttattggcaaacgaggttccgatatcatcattgtaggtcgtggcataatctcagcagctgatcgtctggaagcagcagagatgtacagaaaagctgcttgggaagcgtatttgagtagacttggtgtttgagtgcttcagatacatttttcagatacaatgtgaagacattgaagatatgtggtcctcctgaaagtcactggctggaaataatccaattattcctgcttggattcttccacagggcctgtgtaagaatgggttctggagttctcatggtctttaggaaatattgagtaatttgtaatcaccgcattgatactataataagttcattcttaagcttgctttttttgagactggtgtttgttagacagccacagtcctgtctgggttagggtcttccacatttgaggatccttcctatctctccatgggactagactgctttgttattctatttattttttaatttttttcgagacaggatctcactctgttgcccaggatggagtgcagtggtgagatcacggctcattgcagcctcgacctcccaggtgatcctcccacctcagcttccagattagctggtgctataggcatgcaccaccacgtccatctaaatttctttattatttgtagagatgaggtcttgccatgttacccaggctggtctcaactcctgggctcaagcgatcctcctgcctcagtctctcaaagtgctgggattacaggtgtgagccactgtgcccagcctaattgcagtaagacaaaaattctagggcaccaagaggctaaagtcagcacagcttttcttgtgtcctgtatt

SEQ ID NO: 256 - DNA, 4817 bp, Homo Sapiens
gaagcgccagagcggcggccggtcccgcgcggagcccggcgcccctccagcccgagccaggacgccgccggccccggtcccggccccgggcacgcagcgagccagggatgtgagcggcgccccgcggcatggcagcctcaggggtgcccagaggatgcgacatcctcatcgtctacagcccggatgccgaggaatggtgccagtacctgcagaccctgttcctgtccagtcggcaggtccgcagccagaagatactgactcacaggctgggccccgaggcctccttctcggcagaggacctaagccttttcctcagcacccgctgtgtcgtggtgctgctgtccgcggagctggtgcagcacttccacaagcccgccttgctgcccctgctgcagagagctttccatcctccgcaccgcgtggtcaggctgctctgcggcgtgcgggacagcgaggagttcctagacttctttccagattgggcccattggcaggagctcacctgtgacgatgagccagagacctacgtggcagctgtgaaaaaagccatttccgaagattctggctgtgactcagtcactgacactgagcctgaggacgagaaggttgtttcctactcgaagcagcagaacctgccgacggtgacttcacctgggaacctgatggtggtgcagccggaccgcattcgctgtggggcagaaaccactgtctatgttattgtgagatgtaagctggatgacagggtggcgacagaagcagagttttctcctgaggattctccctctgtaaggatggaagccaaggtggagaatgagtacaccatttcagtgaaggctcccaacctttcatctgggaacgtttctctgaagatatattctggagacttagtggtgtgtgaaaccgttatcagctattatactgacatggaagaaattgggaatttattgtccaatgccgcgaatcctgtggaattcatgtgtcaggcctttaaaattgtgccctacaacacagagacccttgataaactgctaaccgaatccctgaagaacaatatccctgcaagcggactgcacctctttggaatcaaccagctggaagaagaagatatgatgacaaatcagagggatgaagagctgcccaccctgttgcattttgctgcgaagtatggactgaagaacctcactgccttgttgctcacctgcccaggagccctgcaggcgtacagcgtggccaacaagcatggccactaccccaacaccatcgctgagaaacacggcttcagggacctgcggcagttcatcgacgagtatgtggaaacggtggacatgctcaagagtcacattaaagaggaactgatgcacggggaggaggctgatgctgtgtacgagtccatggcccacctttccacagacctgcttatgaaatgctcgctcaaccccggctgtgacgaggatctctatgagtccatggctgcctttgtcccagctgccactgaagacctctatgttgaaatgcttcaggccagtacatctaacccaatccctggagatggtttctctcgggccactaaggactctatgatccgcaagtttttagaaggcaacagcatgggaatgaccaatctggagagagatcagtgccatcttggtcaggaagaagatgtttatcacacggtggatgacgatgaggccttttctgtggacctggccagcaggccccctgtcccagtgcccagaccagagaccactgctcctggtgctcaccagctgcctgacaacgaaccatacatttttaaagtttttgcagaaaaaagtcaagagcggcctgggaatttctacgtttcctcagagagcatcaggaaagggccgcccgtcagaccatggagggacaggccccagtcgagtatatatgacccttttgcgggaatgaaaacgccaggccagcggcagcttatcaccctccaggagcaggtgaagctgggcattgtcaacgtggatgaggctgtgctccacttcaaagagtggcagctcaaccagaagaaacgatcggagtcctttcgtttccagcaggaaaatcttaaacggctaagagacagcatcacccgaagacagagagagaagcaaaaatcaggaaagcagacagacttggagatcacggtcccaattcggcactcacagcacctgcctgcaaaagtggagtttggagtctatgagagtggccccaggaaaagtgtcattccccctaggacggagctgagacgaggagactggaaaacagacagcacctccagcacagcaagtagcacaagtaaccgctccagcacccggagcctcctcagtgtgagcagcgggatggaaggggacaacgaggataatgaagtccctgaggttaccagaagtcgcagtccaggccccccacaagtggatgggacacccaccatgtccctcgagagaccccccagggtgcctccgagagctgcctcacagaggcctccgaccagggagaccttccatcctcctccacctgttccacccagaggacgctgattccacctcctaaaacctgcctacttcaggactttaagactcacagtcttcagcctgttaatgatgtcttcatgttgagttttatagcatgactgttgaccttaagatccattctcattgctgataatgctgcagccctgctggtttgggcttgcctcgaagattttattaaggcacgaagaagtgaaaaactaagggcttcattcaccatcaccaagtatatcgaaccatatacttgtttgccaaaaggatgaagacttaatcgaaatacttacctctaatttgccatatcagaagcctaaaaagaatgatcataaatgtacttcaccagtgattttactgaaatgcacttatattagtctttatgtatttgctagttcagcctgatttctagaagaggttatagtgtgagacttgtagtattcaagtaagataagtgacctaattttaaaataattcttctacttttctgtatattcagcagggtatttaagtgctagggctggtcacacacaaccaactgaaaaagactagagggattagtacaaactcctcttatacagaaggcaaatctgaggttccacagaagtctggaaccaagactattcagttggttaaataaagaggttagtctagactgggcctgctcattctaggtcaccacattttccatctccaaatagccaggccctctctccctcaagaaatgcccagatgtagaaattcatcagtgcctattggtcttccagaattttccatcttccgtatctcccaggcatgagactaccaagtttgtttgttttctttccaatttgggaatttatacttcagtatggtttcaacgcagttatgtttccagagaacatctagaagtggctggaaaccagaagctggggattccagggaccccacttagtgctctatttcctttataggttttatttctggtcatagagagagaaggacctttgactttttcttcgttgaggcttctgaggaggaaaaacaaacctaaaatagaaatacagtcagcctttcaaatccatgggttctgtgtccgtggattcaaccaaccttggatcaaaaatatttgaaaaaaaatctacaaagtttcaaaaagcaaaacttgaatttgctgcatgccaagaagtatgttgaattcatgtaaatgaagtgatgtgtaggcattgtattagatattataagaaatctagaaatgatttaaagcatacaggaggatgtgcataggttatatgcaaatactatgctattttatatatgggacttgagcatttgtggattttgatactgggggatcctggaaccaatcccccatggataccaaagtacgactgtagttatctattttttacatacttattattaccaccatgctcagtaagtccatttttgcatggaatatggagccttaaaacatgtcatgaatttggagtccctggcacataaatctaccttcaaatcagaggtccttaatgatgcctaaacatacagtaaaattagaatcagaaatacttctttaaaaaatattcaaaatgtgtttgtttcccatgggattattctctatcccacacgaatgtaaaaaaatccacattaatgatccatttaagtatagttttattgggtccttttctaatgattaaaggttctttctcaatttcattcctcagtcctgcaagtaaggactcatactgaagagtactgaaacaaggacttcttgtcagaaacagcttctggaatcttgggttttgtttttgttttttgacaaaatacactattggccatgtccatcacgagagtgtttgtagtaattaattaccttgtacaggacctggcacttagtagcattcttcaaatgttccctcagtgatccttttactctccttgtcacttatttgggagaaataggggcacgtgagataagaagaagaataattttgatgttggtatgcttgccctgttacttatagacagtctttgtcataggcaaacttgaatttgatttaaaatagggctgggaaaaatattcaataactgtaagcccccttttggatgccaaacttagaattttgtacattctctgatgaacaagcatttagatcgtaacatggtaaagcctattaccagccaatgttgttagcatctttgtatgcacatcactgtttgtgcaatatatgaatattttgttgcattgtattcttatataaaaataagtagaaaacataaaattgaaattgctgatgagaaaaaaaa

SEQ ID NO: 257 - DNA, 4637 bp, Homo Sapiens
aggtgaccgagggcccgttcggggctgcgggaagcggcctcgttctcagccgccggagacgccgccgccgccgccgccgccgccacacctagtggagcagccggggaaggcggctcgttgggggctggggcggagagcgccgggggtgggggcggaagggcggcgggcggaaggcaggaggctgccggggcgcgggctgctgcgggagaaggggctccgaggagtccgccgcggctcgctctgtcgccggcgcgggattggggcgcgagggccatgggcgcgctctcctaaggcggaggtcgcgggcgggaggggaggaggcccgagagaggctgctgcgaaggccgcgggcccgtgactgggcgcgaggcggccggcggcggcggcggcaccagcaccaccatgtcgcgctcagtgctgcagcccagtcagcagaagctggcggagaagctcaccatcctcaacgaccggggcgtcggcatgctcacccgcctctacaacatcaagaagcaaggacaagtttggaaggcatgtggagaccccaaggcaaaaccatcctatcttatcgacaaaaacctggaatctgctgtgaaattcatagtcagaaaattccctgctgtagaaacccgcaacaacaatcaacagcttgcacaactacagaaagaaaaatcagagattctgaaaaatctggcattatattacttcacatttgtagatgttatggaatttaaggaccatgtttgtgaattgctgaatactattgacgtttgccaagtcttctttgatattactgtaaactttgatttaacaaagaactacttagatttaattataacctatacaacactaatgatactgctgtctcgaattgaagaaaggaaggcaatcattggattatacaactatgcccatgaaatgactcatggagcaagtgacagagaatacccacgccttggccagatgattgtggattatgaaaaccctttaaagaagatgatggaagaatttgtaccccatagcaagtctctttcagatgcactaatttctcttcaaatggtatatcctcgaaggaatctttcagctgaccagtggagaaatgcccagttattgagcctcatcagtgcacctagtacaatgcttaatccagcacagtccgacactatgccttgtgaatacctctctttggatgcaatggaaaagtggattatctttggctttattttgtgccatgggatcctaaatactgacgctacagcactgaacctttggaaactagctcttcaaagtagctcttgcctctctctctttcgggatgaagttttccacattcacaaagctgcagaagacttatttgtaaacatacgaggctataataaacgtattaatgacataagagaatgcaaggaggcagccgtgtcacatgctggttcaatgcacagagaaagacgcaagtttttaagatctgcactgaaggaattggctactgtcctctctgatcaacctggattgctaggtcccaaggcactttttgtttttatggcattatcctttgcccgtgatgaaatcatctggctacttcgtcatgcagataacatgccaaagaagagtgcagacgactttatagataagcacattgctgaattaatattttacatggaagaacttagagcacatgtgaggaaatacggacctgtaatgcagaggtattacgtgcagtacctttctggctttgatgctgttgtcctcaatgaactcgtgcagaatctttctgtttgccctgaagatgaatcaatcatcatgtcctcttttgttaacactatgacttccctaagtgtaaaacaagttgaagatggggaagtatttgatttcagaggaatgagattagattggtttaggttacaggcatatactagtgtctcaaaggcttcacttggccttgcagatcacagagaacttggaaagatgatgaatacaataatttttcatacaaaaatggtagattccttggtggaaatgttggtggaaacatcagatctctccatattttgtttttatagtcgtgcttttgagaagatgtttcaacagtgtttggagttaccctctcaatcaagatactcaattgcatttccactactttgcactcattttatgagttgcacgcatgaactatgtccagaagagcgacatcatattggagatcgcagtctttccttatgtaatatgttcctagatgaaatggccaaacaagctcgaaatctcatcactgatatttgcacagaacagtgtacccttagtgaccagttgctacccaagcattgtgccaaaactatcagtcaagcagtgaataagaaatcaaaaaagcagactggtaagaaaggggaacctgaaagggagaaaccaggtgttgagagcatgaggaaaaacaggctggttgtgaccaaccttgataaattgcacactgcactttctgagttatgcttctctataaattatgtaccaaacatggtggtatgggaacatacctttaccccacgagaatatttgacttctcatctggaaatacgctttaccaagtcaattgttgggatgactatgtataatcaagccacacaggaaattgcaaaaccttcagaacttctaacaagtgtaagagcatacatgaccgtactccagtcaatagaaaactatgtgcagattgatattacaagagtatttaataatgtgcttcttcaacaaacacaacatttagacagtcatggagagccaaccattacaagtctatacacaaattggtatttggaaactttgttacgacaagtcagcaatggccatatagcatattttcctgcaatgaaagcgtttgtgaacttacctacagaaaatgaattaacattcaatgcagaggaatattctgacatatcagaaatgaggtcattatcagaactactaggcccatatggtatgaagtttctaagtgaaagccttatgtggcatatttcatcacaagttgctgaacttaagaaacttgtggtggagaatgttgatgtgttaacacaaatgaggaccagctttgacaaaccagaccagatggctgcactgtttaaaagattatcatctgttgacagtgtcttgaagaggatgacaataattggtgtaattttatccttccgatcattggcacaagaagcacttagagatgtcttatcctaccacattccttttcttgtaagttcaattgaagattttaaggatcacattccaagggaaactgatatgaaggttgcaatgaatgtgtatgagttatcatcagctgccggattaccttgtgagattgatcctgcattggtcgtagctctttcttcacaaaaatcggaaaacattagtccagaagaagagtataaaattgcctgccttctcatggtgtttgtggcagtttctttgccaacactggccagtaatgtgatgtctcagtacagccctgctatagaagggcattgcaacaacatacattgcttggccaaagccatcaaccagattgctgcagctttgtttacaattcacaaaggaagcattgaagaccgtcttaaagaatttctggcgcttgcatcctccagtctactgaaaattggccaggagacagataaaactacaacaagaaatagagaatctgtttatttactgctagatatgattgtacaagaatctccattccttacaatggatcttttggaatcttgttttccttatgtcttgctgagaaatgcataccatgctgtctacaaacaaagtgttacatcttctgcataaaattacctacttaatcaagataagcacgcatttttgttgccttggttttacctgtagactgtggaactattttaccttaagacctgaaaaagttttgtggattataaatttctttcatacggttgtattttctgatcattggtttcttaatatggttgtactacagtatacttggttgatttaggttgcacattcactgaattcactgagattattcctataattttaaagtatcatttatttgaaaaacatacattatcaacatgtttttgatatttgataatgaaaaaaatctttgcttgtttatttctgaaaaagaactgtatttagtgattattttagatagtgatattatagtattcatctgtgtgtaaattatttcatatagggaagagttctgatctgtacctatggttcttattgaaaacaacattggatgtgcatttctgtgatgttatgaatacatttctactttattttgaaacatttgccaaactaaatactgtaacactgtataacatttaaaaatgttaaagaactgcttagtattagaagcagatcatttcccaaaattctaagagcagcagcatatgttgttgcttgtataaagcctagcgataatttttagactaacttccatggtgccctgttggcattagcactaccattgtaccctgctgtataataaacaatcttagacatttatcaactgttgatacaaatgttagtccctaaccactttttatatatgttttaaatttttgaaattcaagtgtacctgccataacataaaataaacactagactgtatcacacttcgattgaaaaaa

SEQ ID NO: 258 - DNA, 6005 bp, Homo Sapiens
gactggctgcagccgcagtcttggtggaggaggtggtgaccaccaccgctcctccacctgcatccggctgcgggactgcggcggccgcgtttgccctgcagaccctgcaccccgggacgcggctcatctgtcattagcaccggcactaagctcccaccgctcagcgacttggtccgccgcaagctccgccgcaggctttgtccgctagcgctcggctgagtctgggcgggcgggaaacctgggctagggcgaggcggggcccctggacatgcctttctccacgtccgcctcctcgaccctattgtaagcggagaaacttagtgtgcgaggcaggcaggggacgtccccattttgatgtcccgtaccctccacccccttcggatcgaggtagtaaagaggctcctgtaggaaactgactgcctctatgattgcggcctcttgggggattttgcgtttagcccgaaagttggctttgccaaaagacgcacgggtaggaagggcgaaaaggaaaccctgtattccgtcgcgctgggctctccgagtccgtgcgcaaagcggcctacgagtcctggctccgcacctgcagaggacaagagccaatgcctaaaaaagaacagcggaggaaccggctggcgcggccagctggaacgctggatcgcagtgcgcccagggaaggccgggggcgcccgccggccctagccctcagtggtcctctcccacgccggcccgcgcgtgcctctgcctacaagacctggggcgtcctggccagatctggatggcaggtccctccgccacccccggcccggttccgggggcgtggcttggcgcgggggcgggtttaagtcaccgcgggtgtctgaccactctgacaggtctccaaatttctcccagtcgcctggcgcccgcggtgcgtttcagagctccagggtggcacgcggcggcgcttccctagatccagaggcgtctctgtcgacttccacgcggcctcgggcctcccttctcctccaaaccttcgcctcatccgccaagcttcggttctcagcctcagatatccgcaccggcggcttctcttcgttctcggagctcttggctttggagccctcaccactttttccttcccccgcctctcctgatcctcctagctccgagccaaatggactccaaagaacgaaataaaggggatgagaactgtgtgctgcgacccttcgaaagcacagctgaaagcgttgacctcgtcttatagatcaggctgggaccctggggcgagagtccccacaccccctccgggagggatgcttctggccagagccagcgctgcgctgtcagtccttgctcccgaactaggaaagagcctaggagggagcctcagcataccccttcctccaaattaactatttggtgaattgttagcgccgaggctaccacctctccaaccctgtcgcggggcgcgccgccacctcaccgtgaccccctcctcctccttctttgccaccgcccccagctccgcccctgctccccatcccggcgcaatggagttctccgaagggcgatgattccagccacatctgctaacttcgcacccatcgctgccgccggtcaccgccggccaggccccctgcagccgcggagcagtgggcgtccaaagcccagtgcagcagccaggacccgcccgacgcgcagcagaagcacggcgcccaggcgcttaggcgtctcttggagagcaaaggctgcgccaaaacgctgagcctagaatcaaccaaggagcctgagcccaggaaggggctgcgtggctcacagcgctgcggctcctgaggacaaatagccactgccgctgcgtacccaagctgcgccggctggcgggagagcagcacgcaaggacgccgaggtccgccgcgatcttccaggtgccctttgcccctgggcacagtatgacccgacctacagggagccctagcgcagggctcctgcaacgggtcagcctaggataaaaaggatccttgccaagctcctaccaggccgcctttgagtctttaggaacccctcctccggctgcctccccaaggttctgggcctccttccctgcggcccagagccatggagctctccgatgtgcgctgccttacaggcagcgaggaactctacaccatccacccgacgcccccggccggcgacggcaggagcgcctcccggccgcagcggctgctgtggcagacggcggtgcgacacatcacggagcagcgcttcattcacgggcaccggggaggcagcggcagcgggagtggaggctcgggcaaagcctcggaccctgcgggcggcggccccaaccaccacgcgccgcagctgtcaggcgactcggcgctgcccctctactcgctgggcccgggagagcgagcgcacagcacctgcggcaccaaagtcttcccggaacgcagcgggagcggcagtgccagcggcagcggaggcgggggcgacctgggcttcctgcaccttgactgtgcccctagcaactcggatttctttcttaatgggggctatagctaccgaggggtcattttccccaccctgcgcaactccttcaaatctcgggatttggaacgcctctaccagcgctatttcttgggccaaaggcgcaaatcggaagtggtgatgaacgtgctggacgtgctgaccaaactcactctcttggtcctacacttgagcctggcctcggcccccatggacccgctcaagggcatcctgctgggcttcttcaccggcattgaggtagtgatctgcgccctggtggtggtcaggaaggacaccacctcccacacgtacctgcagtacagcggcgtggtcacctgggtggccatgaccacccagatcctggcagcaggcctcggctacgggctcctgggcgacggcataggctacgtgctcttcacgctcttcgccacctacagtatgctgccgctgccgctcacctgggccatcctggccggcctgggcacctcgctgctgcaggtcatcctccaagtggtcataccccggctggcggtcatttccatcaaccaggttgtggcccaggcagtgctattcatgtgtatgaacacagctggaatcttcatcagttacctgtcagaccgggcccagcgccaagctttcctggagactcggaggtgtgtggaggccaggctgcgcctggagacagagaaccaaagacaggagcggctcgtgctttctgtgctcccccggtttgttgtcctggaaatgatcaacgacatgaccaatgtggaagatgagcacctgcagcaccagttccatcggatctacatccatcgctatgagaacgtcagtattctttttgcagatgttaaaggatttaccaacctctccacgaccttgtctgctcaggagctggtcaggatgctcaacgagctctttgccagatttgatcgactggcccatgagcatcactgccttcgtattaaaatcctgggggactgctactactgcgtgtctggacttcctgagccccgccaggaccatgcccactgctgtgttgaaatgggtctcagcatgatcaaaaccatcaggtatgtgcggtcaaggacaaaacacgatgttgacatgaggattggaatccactccggctcggtgctgtgcggtgttttgggactacggaagtggcagtttgatgtctggtcttgggatgtggatattgcaaacaaactcgaatctggaggaatccccgggaggattcacatttccaaagccacgctggactgtctcaacggtgactataacgtggaagagggccatggtaaagagaggaatgaattcctgaggaagcataatatcgaaacttacttaattaagcagcctgaggacagtctgctgtccttgcctgaagatatcgtcaaggagtcagtgagctcctcagaccggagaaacagtggggccacattcactgaaggatcctggagccctgaactgccctttgataatatcgtggggaaacagaatactctggctgccctaacaagaaattcaataaatctgcttccaaaccatcttgcacaagctttgcatgtccagtctgggcctgaggaaattaacaagagaatagaacataccatcgacttgcggagtggcgataaattgagaagagagcatatcaagccattctcactgatgtttaaagactccagcctggagcacaagtattctcaaatgagggatgaagtgttcaagtcaaacttggtctgtgcatttatcgttcttctatttatcacggcaatacaaagtttgcttccttcttcaagagtgatgccaatgaccatccagttctccattctgattatgctgcactcggctctggtcctcatcaccacagcagaggattataaatgtttgcccctcatcctccggaaaacttgctgttggattaatgagacctatttggcccggaacgtcatcatctttgcatccattttgattaatttcctgggtgccatcttaaatatcctgtggtgtgattttgacaagtcgatacccttgaagaacctgactttcaattcctcagctgtgtttacagatatctgctcctacccagagtactttgtcttcacgggggtgttggccatggtgacctgtgcagttttcctccggctgaactccgtcctgaagctggcagtgctgctgatcatgattgccatctatgccctgctcactgagaccgtctacgcaggcctctttctgcgttatgacaacctcaaccacagtggagaagatttcctggggaccaaggaggtatcactgctactgatggccatgttcctcctggctgtgttctaccatggacagcagctggagtacacagcccgcctggacttcctttggcgagtacaggccaaagaggagatcaatgagatgaaggagctgagggaacacaatgagaacatgctccggaatatcttacccagccatgtggcccgccatttcctagagaaggaccgagacaatgaggagctgtattctcaatcctatgatgctgttggggtgatgtttgcctccatcccaggatttgcggacttttactctcagactgaaatgaataaccagggagtggaatgcctgcgcttgctcaatgagatcattgctgacttcgatgagttgcttggtgaagaccgatttcaagacattgaaaagattaagaccattggcagcacctacatggccgtgtcaggcctgtcacctgaaaaacagcaatgtgaagacaagtggggacatttgtgtgctctggctgacttctcactcgccctgacagaaagcatacaggagatcaacaagcattcattcaacaattttgaactccggattggcatcagccacggctcagtggtagctggcgttatcggcgctaagaaaccacagtatgacatttggggcaaaactgtgaacctggcaagccgaatggacagcacgggggttagtggccggatccaagtcccagaggagacctatctcatcctgaaggaccagggctttgcctttgattaccgaggggagatctatgtgaagggtatcagtgaacaggaaggaaaaatcaaaacgtactttcttctgggaagagtccaacccaacccattcatcttgcccccaagaagactgcctgggcagtactccctggccgcggttgtcctgggacttgtccagtccctcaataggcaaaggcagaagcagctactcaatgagaacaacaacacaggaatcatcaagggtcattacaaccggcggactttgttgtcacccagcggcacagagcctggagcccaggctgaaggcaccgacaaatctgatttgccataaaagcattttctttctgtttttttttttttttgtatttcttttatatataaaataaatatactaataaaaaggtttaattttttttagaacaaaaaaaaaaaaaaaaaaaaaaaaaaaaaaaaaaaaaaaaaaaaaaccccaaaaaaaaaaaaaaa

SEQ ID NO: 259 - DNA, 2528 bp, Homo Sapiens
aaaaatcagcctgtctgctctctccttgctcaacaaggcctctaacagtcttctgtcctctattctgcacacggcatatttgggaacgagaaacccaaagttttcccaaatgaagagaactcacttgtttattgtggggatttattttctgtcctcttgcagggcagaagaggggcttaatttccccacatatgatgggaaggaccgagtggtaagtctttccgagaagaacttcaagcaggttttaaagaaatatgacttgctttgcctctactaccatgagccggtgtcttcagataaggtcacgccaaaacagttccaactgaaagaaatcgtgcttgagcttgtggcccaggtccttgaacataaagctataggctttgtgatggtggatgccaagaaagaagccaagcttgccaagaaactgggttttgatgaagaaggaagcctgtatattcttaagggtgatcgcacaatagagtttgatggcgagtttgcagctgatgtcttggtggagttcctcttggatctaattgaagacccagtggagatcatcagcagcaaactggaagtccaagccttcgaacgcattgaagactacatcaaactcattggctttttcaagagtgaggactcagaatactacaaggcttttgaagaagcagctgaacacttccagccttacatcaaattctttgccacctttgacaaaggggttgcaaagaaattatctttgaagatgaatgaggttgacttctatgagccatttatggatgagcccattgccatccccaacaaaccttacacagaagaggagctggtggagtttgtgaaggaacaccaaagacccactctacgtcgcctgcgcccagaagaaatgtttgaaacatgggaagatgatttgaatgggatccacattgtggcctttgcagagaagagtgatccagatggctacgaattcctggagatcctgaaacaggttgcccgggacaatactgacaaccccgatctgagcatcctgtggatcgacccggacgactttcctctgctcgttgcctactgggagaagactttcaagattgacctattcaggccacagattggggtggtgaatgtcacagatgctgacagtgtctggatggagattccagatgatgacgatcttccaactgctgaggagctggaggactggattgaggatgtgctttctggaaagataaacactgaagatgatgatgaagatgatgatgatgatgataattctgatgaagaggataatgatgacagtgatgacgatgatgatgaatagcccaactccaaacaattctgatgaaaacaaaatcacagcacccactaccatacagacagcacaaggtggcagcaagcaattctgccccacacccagccagctcctttcccttttccatcatctcttttcccactccctttgcgtcaggagcagcatcattcagcaaatgccttttcaaatgcagcaatcccacttagcagggacaggagaaaaattattcccatgttgactgtcttgactgtcacggaacagatcttgttctttgctggaccatcaagggtcatggcagtgcctgaacatggcagtctagggtgaacaatcccctaacacaagtttacttgtctttgattatgacagtaacaaaattgacagctttctaactcacaggcatagagtgaccttttaatcagagcccagggaagacacatgattaatgatttagctccctccatacctcgaacatcagttgggatccctcctccagccaagatgatccttcttagagaaggctcagccttggaagcaaacttataaatcatattctcatggctttgttaaacttatttcaagtgatggtcattcatatcactatgaacttggatattcaagcctttggatggctatggagagggcttgaaatgtgtacaggtgtcaccatcatttctagtatattaggaaactgggatgggaggttgatttgctctctaaacttccctctagttggcaagtctcacatattcatcagcaggagtggagggtgggggaaaactagaaagatgaaaacttttacatttttctgatgggttcatgtctctgattgggtcagctggcttcctagcctaagctgggatctgaataccccttctctgtagctgctagtgagccttcccatttagattaaagattgctttatccagcagtcaattaactctccagttatcagtactcccacaattggccagggcaacaataattggagttcatactgatgccctgaggcactgaaaaaaaaaaaaatcccaaagtgccttctgagctgtctaaaagttacattgtgcttggtagatttagtgttaagtgtgcagtataattttctaatttattttctcaatcttttagcacatgtgtaagacactgtgcaaatttttggaaaatagagcaatactttttgtggaatactagctaactaattctgtcattaaactcatattttggaaat

SEQ ID NO: 260 - DNA, 5084 bp, Homo Sapiens
gatcccatcgcagctaccgcgatgagaggcgctcgcggcgcctgggattttctctgcgttctgctcctactgcttcgcgtccagacaggctcttctcaaccatctgtgagtccaggggaaccgtctccaccatccatccatccaggaaaatcagacttaatagtccgcgtgggcgacgagattaggctgttatgcactgatccgggctttgtcaaatggacttttgagatcctggatgaaacgaatgagaataagcagaatgaatggatcacggaaaaggcagaagccaccaacaccggcaaatacacgtgcaccaacaaacacggcttaagcaattccatttatgtgtttgttagagatcctgccaagcttttccttgttgaccgctccttgtatgggaaagaagacaacgacacgctggtccgctgtcctctcacagacccagaagtgaccaattattccctcaaggggtgccaggggaagcctcttcccaaggacttgaggtttattcctgaccccaaggcgggcatcatgatcaaaagtgtgaaacgcgcctaccatcggctctgtctgcattgttctgtggaccaggagggcaagtcagtgctgtcggaaaaattcatcctgaaagtgaggccagccttcaaagctgtgcctgttgtgtctgtgtccaaagcaagctatcttcttagggaaggggaagaattcacagtgacgtgcacaataaaagatgtgtctagttctgtgtactcaacgtggaaaagagaaaacagtcagactaaactacaggagaaatataatagctggcatcacggtgacttcaattatgaacgtcaggcaacgttgactatcagttcagcgagagttaatgattctggagtgttcatgtgttatgccaataatacttttggatcagcaaatgtcacaacaaccttggaagtagtagataaaggattcattaatatcttccccatgataaacactacagtatttgtaaacgatggagaaaatgtagatttgattgttgaatatgaagcattccccaaacctgaacaccagcagtggatctatatgaacagaaccttcactgataaatgggaagattatcccaagtctgagaatgaaagtaatatcagatacgtaagtgaacttcatctaacgagattaaaaggcaccgaaggaggcacttacacattcctagtgtccaattctgacgtcaatgctgccatagcatttaatgtttatgtgaatacaaaaccagaaatcctgacttacgacaggctcgtgaatggcatgctccaatgtgtggcagcaggattcccagagcccacaatagattggtatttttgtccaggaactgagcagagatgctctgcttctgtactgccagtggatgtgcagacactaaactcatctgggccaccgtttggaaagctagtggttcagagttctatagattctagtgcattcaagcacaatggcacggttgaatgtaaggcttacaacgatgtgggcaagacttctgcctattttaactttgcatttaaaggtaacaacaaagagcaaatccatccccacaccctgttcactcctttgctgattggtttcgtaatcgtagctggcatgatgtgcattattgtgatgattctgacctacaaatatttacagaaacccatgtatgaagtacagtggaaggttgttgaggagataaatggaaacaattatgtttacatagacccaacacaacttccttatgatcacaaatgggagtttcccagaaacaggctgagttttgggaaaaccctgggtgctggagctttcgggaaggttgttgaggcaactgcttatggcttaattaagtcagatgcggccatgactgtcgctgtaaagatgctcaagccgagtgcccatttgacagaacgggaagccctcatgtctgaactcaaagtcctgagttaccttggtaatcacatgaatattgtgaatctacttggagcctgcaccattggagggcccaccctggtcattacagaatattgttgctatggtgatcttttgaattttttgagaagaaaacgtgattcatttatttgttcaaagcaggaagatcatgcagaagctgcactttataagaatcttctgcattcaaaggagtcttcctgcagcgatagtactaatgagtacatggacatgaaacctggagtttcttatgttgtcccaaccaaggccgacaaaaggagatctgtgagaataggctcatacatagaaagagatgtgactcccgccatcatggaggatgacgagttggccctagacttagaagacttgctgagcttttcttaccaggtggcaaagggcatggctttcctcgcctccaagaattgtattcacagagacttggcagccagaaatatcctccttactcatggtcggatcacaaagatttgtgattttggtctagccagagacatcaagaatgattctaattatgtggttaaaggaaacgctcgactacctgtgaagtggatggcacctgaaagcattttcaactgtgtatacacgtttgaaagtgacgtctggtcctatgggatttttctttgggagctgttctctttaggaagcagcccctatcctggaatgccggtcgattctaagttctacaagatgatcaaggaaggcttccggatgctcagccctgaacacgcacctgctgaaatgtatgacataatgaagacttgctgggatgcagatcccctaaaaagaccaacattcaagcaaattgttcagctaattgagaagcagatttcagagagcaccaatcatatttactccaacttagcaaactgcagccccaaccgacagaagcccgtggtagaccattctgtgcggatcaattctgtcggcagcaccgcttcctcctcccagcctctgcttgtgcacgacgatgtctgagcagaatcagtgtttgggtcacccctccaggaatgatctcttcttttggcttccatgatggttattttcttttctttcaacttgcatccaactccaggatagtgggcaccccactgcaatcctgtctttctgagcacactttagtggccgatgatttttgtcatcagccaccatcctattgcaaaggttccaactgtatatattcccaatagcaacgtagcttctaccatgaacagaaaacattctgatttggaaaaagagagggaggtatggactgggggccagagtcctttccaaggcttctccaattctgcccaaaaatatggttgatagtttacctgaataaatggtagtaatcacagttggccttcagaaccatccatagtagtatgatgatacaagattagaagctgaaaacctaagtcctttatgtggaaaacagaacatcattagaacaaaggacagagtatgaacacctgggcttaagaaatctagtatttcatgctgggaatgagacataggccatgaaaaaaatgatccccaagtgtgaacaaaagatgctcttctgtggaccactgcatgagcttttatactaccgacctggtttttaaatagagtttgctattagagcattgaattggagagaaggcctccctagccagcacttgtatatacgcatctataaattgtccgtgttcatacatttgaggggaaaacaccataaggtttcgtttctgtatacaaccctggcattatgtccactgtgtatagaagtagattaagagccatataagtttgaaggaaacagttaataccattttttaaggaaacaatataaccacaaagcacagtttgaacaaaatctcctcttttagctgatgaacttattctgtagattctgtggaacaagcctatcagcttcagaatggcattgtactcaatggatttgatgctgtttgacaaagttactgattcactgcatggctcccacaggagtgggaaaacactgccatcttagtttggattcttatgtagcaggaaataaagtataggtttagcctccttcgcaggcatgtcctggacaccgggccagtatctatatatgtgtatgtacgtttgtatgtgtgtagacaaatatttggaggggtatttttgccctgagtccaagagggtcctttagtacctgaaaagtaacttggctttcattattagtactgctcttgtttcttttcacatagctgtctagagtagcttaccagaagcttccatagtggtgcagaggaagtggaaggcatcagtccctatgtatttgcagttcacctgcacttaaggcactctgttatttagactcatcttactgtacctgttccttagaccttccataatgctactgtctcactgaaacatttaaattttaccctttagactgtagcctggatattattcttgtagtttacctctttaaaaacaaaacaaaacaaaacaaaaaactccccttcctcactgcccaatataaaaggcaaatgtgtacatggcagagtttgtgtgttgtcttgaaagattcaggtatgttgcctttatggtttcccccttctacatttcttagactacatttagagaactgtggccgttatctggaagtaaccatttgcactggagttctatgctctcgcacctttccaaagttaacagattttggggttgtgttgtcacccaagagattgttgtttgccatactttgtctgaaaaattcctttgtgtttctattgacttcaatgatagtaagaaaagtggttgttagttatagatgtctaggtacttcaggggcacttcattgagagttttgtcttgccatactttgtctgaaaaattcctttgtgtttctattgacttcaatgatagtaagaaaagtggttgttagttatagatgtctaggtacttcaggggcacttcattgagagttttgtcaatgtcttttgaatattcccaagcccatgagtccttgaaaatattttttatatatacagtaactttatgtgtaaatacataagcggcgtaagtttaaaggatgttggtgttccacgtgttttattcctgtatgttgtccaattgttgacagttctgaagaattc

SEQ ID NO: 261 - DNA, 2059 bp, Homo Sapiens
ccgcaggcgctcggggttggagccagcgaccgtcggtagcagcatggctctcctctttctcctaccccttgtcatgcagggtgtgagcagggctgagatgggcaccgcggatctggggccgtcctcagtgcctacaccaactaatgttacaattgaatcctataacatgaaccctatcgtatattgggagtaccagatcatgccacaggtccctgtttttaccgtagaggtaaagaactatggtgttaagaattcagaatggattgatgcctgcatcaatatttctcatcattattgtaatatttctgatcatgttggtgatccatcaaattctctttgggtcagagttaaagccagggttggacaaaaagaatctgcctatgcaaagtcagaagaatttgctgtatgccgagatggaaaaattggaccacctaaactggatatcagaaaggaggagaagcaaatcatgattgacatatttcacccttcagtttttgtaaatggagacgagcaggaagtcgattatgatcccgaaactacctgttacattagggtgtacaatgtgtatgtgagaatgaacggaagtgagatccagtataaaatactcacgcagaaggaagatgattgtgacgagattcagtgccagttagcgattccagtatcctcactgaattctcagtactgtgtttcagcagaaggagtcttacatgtgtggggtgttacaactgaaaagtcaaaagaagtttgtattaccattttcaatagcagtataaaaggttctctttggattccagttgttgctgctttactactctttctagtgcttagcctggtattcatctgtttttatattaagaaaattaatccattgaaggaaaaaagcataatattacccaagtccttgatctctgtggtaagaagtgctactttagagacaaaacctgaatcaaaatatgtatcactcatcacgtcataccagccattttccttagaaaaggaggtggtctgtgaagagccgttgtctccagcaacagttccaggcatgcataccgaagacaatccaggaaaagtggaacatacagaagaactttctagtataacagaagtggtgactactgaagaaaatattcctgacgtggtcccgggcagccatctgactccaatagagagagagagttcttcacctttaagtagtaaccagtctgaacctggcagcatcgctttaaactcgtatcactccagaaattgttctgagagtgatcactccagaaatggttttgatactgattccagctgtctggaatcacatagctccttatctgactcagaatttcccccaaataataaaggtgaaataaaaacagaaggacaagagctcataaccgtaataaaagcccccacctcctttggttatgataaaccacatgtgctagtggatctacttgtggatgatagcggtaaagagtccttgattggttatagaccaacagaagattccaaagaattttcatgagatcagctaagttgcaccaactttgaagtctgattttcctggacagttttctgctttaatttcatgaaaagattatgatctcagaaattgtatcttagttggtatcaaccaaatggagtgacttagtgtacatgaaagcgtaaagaggatgtgtggcattttcacttttggcttgtaaagtacagacttttttttttttttaaacaaaaaaagcattgtaacttatgaacctttacatccagataggttaccagtaacggaacatatccagtactcctggttcctaggtgagcaggtgatgccccagggacctttgtagccacttcactttttttcttttctctgccttggtatagcatatgtgttttgtaagtttatgcatacagtaattttaagtaatttcagaagaaattctcgaagcttttcaaaattggacttaaaatctaattcaaactaatagaattaatggaatatgtaaatagaaacgtgtatattttttatgaaacattacagttagagatttttaaataaagaattttaaaactc

SEQ ID NO: 262 - DNA, 1487 bp, Homo Sapiens
ctagcactctgacctagcagtcaacatgaaggctctcattgttctggggcttgtcctcctttctgttacggtccagggcaaggtctttgaaaggtgtgagttggccagaactctgaaaagattgggaatggatggctacaggggaatcagcctagcaaactggatgtgtttggccaaatgggagagtggttacaacacacgagctacaaactacaatgctggagacagaagcactgattatgggatatttcagatcaatagccgctactggtgtaatgatggcaaaaccccaggagcagttaatgcctgtcatttatcctgcagtgctttgctgcaagataacatcgctgatgctgtagcttgtgcaaagagggttgtccgtgatccacaaggcattagagcatgggtggcatggagaaatcgttgtcaaaacagagatgtccgtcagtatgttcaaggttgtggagtgtaactccagaattttccttcttcagctcattttgtctctctcacattaagggagtaggaattaagtgaaaggtcacactaccattatttccccttcaaacaaataatatttttacagaagcaggagcaaaatatggcctttcttctaagagatataatgttcactaatgtggttattttacattaagcctacaacatttttcagtttgcaaatagaactaatactggtgaaaatttacctaaaaccttggttatcaaatacatctccagtacattccgttcttttttttttttgagacagtctcgctctgtcgcccaggctggagtgcagtggcgcaatctcggctcactgcaacctccacctcccgggttcacgccattctcctgcctcagcctcccgagtagctgggattacgggcgcccgccaccacgcccggctaattttttgtatttttagtagagacagggtttcaccgtgttagccaggatggtctcgatctcctgaccttgtgatccacccacctcggcctcccaaagtgctgggattacaggcgtgagccactgcgcccggccacattcagttcttatcaaagaaataacccagacttaatcttgaatgatacgattatgcccaatattaagtaaaaaatataagaaaaggttatcttaaatagatcttaggcaaaataccagctgatgaaggcatctgatgccttcatctgttcagtcatctccaaaaacagtaaaaataaccactttttgttgggcaatatgaaatttttaaaggagtagaataccaaatgatagaaacagactgcctgaattgagaattttgatttcttaaagtgtgtttctttctaaattgctgttccttaatttgattaatttaattcatgtattatgattaaatctgaggcagatgagcttacaagtattgaaataattactaattaatcacaaatgtgaagttatgcatgatgtaaaaaatacaaacattctaattaaaggctttgcaacac

SEQ ID NO: 263 - DNA, 2399 bp, Homo Sapiens
atagcagcttagaatcccagctgctggctcgggctgcagttctctcatggctcgcgcagggtggaccagccccgttcctttatgtgtgtgtctactgctgacctgtggctttgccgaggcagggaagctgctggtagtgcccatggatgggagtcactggttcaccatgcagtcggtggtggagaaacttatcctcagggggcatgaggtggttgtagtcatgccagaggtgagttggcaactggaaagatcactgaattgcacagtgaagacttactcaacctcgtacactctggaagatcagaaccgggaattcatggttttcgcccatgctcaatggaaagcacaggcacaaagtatattttctctattaatgagttcatccagtggttttcttgacttatttttttcgcattgcaggagtttgtttaatgaccgaaaattagtagaatacttaaaggagagttcttttgatgcagtgtttctggatccttttgatacctgtggcttaattgttgctaaatatttctccctcccctctgtggtcttcaccaggggaatattttgccaccatcttgaagaaggtgcacagtgccctgctcctctttcctatgtccccaatgatctcttagggttctcagatgccatgactttcaaggagagagtatggaaccacatcgtgcacttggaggaccatttattttgccagtatctttttagaaatgccctagaaatagcctctgaaattctccaaacccctgtcacggcatatgatctctacagtcacacatcaatttggttgttgcgaacggactttgttttggactatcccaaacccgtgatgcccaacatgatcttcattggtggtatcaactgtcatcagggaaagccattgcctatggaatttgaagcctacattaatgcttctggagaacatggaattgtggttttctctttgggatcaatggtctcagaaattccagagaagaaagctatggcaattgctgatgctttgggcaaaatccctcagacagtcctgtggcggtacactggaacccgaccatcgaatcttgcgaacaacacgatacttgttaagtggctaccccaaaacgatctgcttggtcacccgatgacccgtgcctttatcacccatgctggttcccatggtgtttatgaaagcatatgcaatggcgttcccatggtgatgatgcccttgtttggtgatcagatggacaatgcaaagcgcatggagactaagggagctggagtgaccctgaatgttctggaaatgacttctgaagatttagaaaatgctctaaaagcagtcatcaatgacaaaagttacaaggagaacatcatgcgcctctccagccttcacaaggaccgcccggtggagccgctggacctggccgtgttctgggtggagtttgtgatgaggcacaagggcgcgccacacctgcgccccgcagcccacgacctcacctggtaccagtaccattccttggacgtgattggtttcctcttggccgtcgtgctgacagtggccttcatcacctttaaatgttgtgcttatggctaccggaaatgcttggggaaaaaagggcgagttaagaaagcccacaaatccaagacccattgagaagtgggtgggaaataaggtaaaattttgaaccattccctagtcatttccaaacttgaaaacagaatcagtgttaaattcattttattcttattaaggaaatactttgcataaattaatcagccccagagtgctttaaaaaattctcttaaataaaaataatagactcgctagtcagtaaagatatttgaatatgtatcgtgccccctctggtgtctttgatcaggatgacatgtgccatttttcagaggacgtgcagacaggctggcattctagattacttttcttactctgaaacatggcctgtttgggagtgcgggattcaaaggtggtcccacggctgcccctactgcaaatggcagttttaatcttatcttttggcttctgcagatggttgcaattgatccttaaccaataatggtcagtcctcatctctgtcgtgcttcataggtgccaccttgtgtgtttaaagaagggaagctttgtacctttagagtgtaggtgaaatgaatgaatggcttggagtgcactgagaacagcatatgatttcttgctttggggaaaaagaatgatgctatgaaattggtgggtggtgtatttgagaagataatcattgcttatgtcaaatggagctgaatttgataaaaacccaaaatacagctatgaagtgctgggcaagtttactttttttctgatgtttcctacaactaaaaataaattaataaatttatataaattctatttaaaaaaaaaaaaaaaa

SEQ ID NO: 264 - DNA, 7709 bp, Homo Sapiens
attttgaagagaggggtcccggggagctccctccaagatctagaggctccgcggccacccctgccgggtcctgccaagacttgctagaaggaacgagtcgcgtgccttagttagttggttcccgtcacaggaagaaacgcctttgcagtgggtttaattgcttctgggccgagcgaattccccgccgtacaactcagtggtgcggactttgcctcctgctaccctgttgctgcgccgagcggggtgggaaagtttctggagttgtcagtcgcgcagcccgtggccacctagacccgaggtgcgggcgcctgcgaagggcccccgcggggtggccggggccgccggggcatgcagcgcgggggcgcggctcggtgacgccgcgggcggggacccggcatccgggcaggctgcgcgcgggtgcggggcgagggcgccgcggggactgggacgcacggcccgcgcgcgggacacggccatggaggacgcgggagcagctggcccggggccggagcctgagcccgagcccgagccggagcccgagcccgcgccggagccggaaccggagcccaagccgggtgctggcacatccgaggcgttctcccgactctggaccgacgtgatgggtatcctggacggttcactgggaaacatcgatgacctggcgcagcagtatgcagattattacaacacctgtttctccgacgtgtgcgagaggatggaggagctgcggaaacggcgggtttcccaggacctggaagtggagaaacccgatgctagccccacgtcacttcagctgcggtcccagatcgaagagtcgcttggcttctgtagcgccgtgtcaaccccagaagtggaaagaaagaaccctcttcataaatcaaactcagaagacagctctgtaggaaaaggagactggaagaagaaaaataagtatttctggcagaacttccgaaagaaccagaaaggaataatgagacagacttcaaaaggagaagacgttggttatgttgccagtgaaataacgatgagcgatgaggagcggattcagctaatgatgatggtcaaagaaaagatgatcacaattgaggaagcacttgctaggctcaaggaatacgaggcccagcaccggcagtcggctgccctggaccctgctgactggccagatggttcttacccaacgtttgatggctcatcaaactgcaattcaagagaacaatcggatgatgagactgaggagtcggtgaagtttaagaggttacacaagctggtaaactccactcgcagagtcagaaagaaactaattagggtggaagaaatgaaaaaacccagcactgaaggtggggaggagcacgtgtttgagaattcgccggtcctggatgaacggtccgccctctactctggcgtgcacaagaagccccttttctttgatggctctcctgagaaacctcccgaagatgactcagactctctcaccacgtctccatcctccagcagcctggacacctggggggctggccggaagttggtcaaaaccttcagcaaaggagagagccggggcctgattaagccccccaagaagatggggacattcttctcctacccagaagaagaaaaggcccagaaagtgtcccgctccctcaccgagggggagatgaagaagggtctcgggtccctaagccacgggagaacctgcagttttggaggatttgacttgacgaatcgctctctgcacgttggcagtaataattctgacccaatgggtaaagaaggagactttgtgtacaaagaagtcatcaaatcacctactgcctctcgcatctctcttgggaaaaaggtgaaatcagtgaaagagacgatgagaaagagaatgtctaaaaaatacagcagctctgtctctgagcaggactcgggccttgatggaatgcctggctcccctccgccttcacagcccgaccccgaacacttggacaagcccaagctcaaggccgggggttctgtagaaagtcttcgcagttctctcagtgggcagagctccatgagcggtcaaacagtgagcaccactgattcctcaaccagcaaccgggaaagcgtcaagtcggaagatggggatgacgaagagccgccttaccgaggcccgttctgcgggcgtgccagggtgcacaccgacttcacccccagtccctatgacacagactcactcaagctcaagaaaggagatatcatcgatataatcagcaagccacccatggggacctggatgggcctgctgaacaacaaagtcggcacgttcaagttcatctacgtggacgtgctcagtgaagacgaggagaaacccaaacgccccaccaggaggcgtcggaaaggacgaccaccccagcccaagtctgtggaggatctcctggatcggattaacctaaaagagcacatgcccactttcctgttcaatggatatgaagatttggacacctttaagctgctggaggaggaagacttggatgagttaaatatcagggacccggaacacagagctgttctcttgacagcagtggagctgttacaagagtatgacagtaacagcgaccagtcaggatcccaggagaagctgctcgttgacagccagggcctgagtggatgctcaccccgagactcaggatgctacgaaagcagtgagaacctggaaaacggcaagactcggaaagctagcctcctatctgccaagtcatccaccgagcccagcttgaagtcttttagcagaaaccagttgggcaattacccaacattgcctttaatgaaatcaggggatgcactgaagcagggacaggaggagggcaggctgggtggtggccttgccccagacacgtccaagagctgtgacccacctggtgtgactggtttgaataaaaaccgaagaagcctcccagtttccatctgccggagctgtgagaccctggagggcccccagactgtggacacttggccccgatcccattccctggatgaccttcaagtggagcctggtgctgagcaagacgtgcctaccgaggtgacagaaccgccccctcagattgtacctgaagtgccacagaagacgaccgcctcttccacgaaggcccagcccctggagcaagactctgctgtcgacaatgcattgctactgacccaaagcaagagattttctgaacctcagaaattgacaactaagaaactggagggctcaatcgcagcctctggtcgcggcctgtcaccccctcagtgtttgcccagaaactatgatgctcagcctcctggagctaaacacggtttagcaaggacgcctctggagggccacagaaaaggacacgagtttgaaggaacacaccatcccctgggcaccaaagaaggggtagatgctgagcagagaatgcagcccaaaattccatcacagcctccacctgttcctgccaaaaagagcagagaacgccttgctaacggactccaccctgttcccatgggccccagtggggccctccccagtcccgatgcgccatgcctgccagtgaaaaggggcagccccgccagccccaccagccctagcgactgtcccccagcactggctcccaggcctctctcagggcaggcgcctggcagcccaccaagcacaaggccgcccccctggctctcagagctccccgagaacacaagcctccaggagcacggtgtgaagctgggcccggctttgaccaggaaggtctcctgtgcccggggagtggatctagaaacgctcactgaaaacaagctgcacgctgaaggcatcgatctcacggaggagccgtattctgataagcatggccgctgtgggattcctgaagccctggtgcagagatacgcagaggacttggatcagcccgagcgggacgtcgccgccaacatggaccagatccgggtgaagcagcttcggaagcagcaccgcatggcgattccaagtggtggactcacggaaatctgccgaaagcccgtctctcctgggtgcatttcgtctgtgtcagattggctcatttccatcggtctgcccatgtacgccggcaccctctccaccgcgggcttcagcacactgagccaagtgccttctctgtctcacacttgccttcaggaggccggcatcacagaggagagacacataagaaagctcctatctgcagccagactcttcaaactgccgccaggccctgaggccatgtagccaggcccggaatgggcctctctggacaagagccaccctttcactgtgcatatgatgctgatgcaattcctccatcatctctggacgtgcagaccagatccagaagaaaggcctggcgtgtggccaaacagcgtgaaaccttggcacaggactgaggatcctctcctccagaaaagccccctcgaggaaataaattagtgcggttctctttgacccccaaagacaagacaagcacttatttttattttcagaagacaaaagaaccaagatgccaactggctgcgaatgctctatctccagtctgtctctgtgtactggtagaggctgggaggagtagggggcagcctgttccatttctgatagtgcccttgctcttctgtctgtcatcttgcaggatgcccgagggccagatgggcttagctaggccaaagtaacagactcaagagttattgtacattactgaccacgctcatttgttcaaaagttagaacatctggctgcaccaggaaaaaaaaaaaaaaaaagtcctgttcttctttagataaacaagagacattttcataattgctttctagcaatcagcttttatttgccttaatataagcttttaagcagttatctaactagtgtccacaaccctgtaaccatacttccacatcttcagcttaggcagacatcgaacctctctgggatgtttccagcaaaagtgagcttttctaatcgtctcattgtaacatggcttattttgtagaggtattcatcagccacacacttcatgttggtttttggtttttaagctaactacaaatctagtaaaaagctatctgaaattcacaaatatcatgtgtgtgcgtgcgtgcgtgcgcgtgtgtgtctgtattcatagtgactgcttttggttttaaccagtttagtatcgttactgtgtggatcgtcgcgctgcagtattgacttggaatcctgaccatgtccatcccaaaattcagtcctcagttaacggatcatgtttgcaaaaggtcactgtgaggctgcatatttcagaaagatgtccttaataagggaagtcatgtataagatgttttctaaaagacttttcagtattacaactaatactattattatccttctttttttatttagataattcttttaatttaaacaaaggttcactatggaaccagacaaatctcattagccatgtgttaagtatttgctactttaaattgttttacaactgatttcagcacattctatccttttttttttttgaaatggagtttcgctcttgtcacccaggctggagtgcaatggcacgatcttggctcactgcaacctcagtctcccaggttcaagtgattctcctgccttagcctcccgagtagctgggattataggcacccaccaccacgcccagctaatttttgtattattagtagagacagggtttcaccatgttggccaggctggtctcaaactcaactcctgacctcaggtggtccacccgcctcagcctcccaaagtgctgggattacaggtgtgagccaccgcacctggcctctgtcctcttttagtctagtgtctggttttctagcaaacagtaaatttaaacaagtaaactattatggtttccattgcttacaaaatgattttcctttacattcttatcatgaacactattttaagcatcaaatgcaatcatctaaaatataaaggtcaatcatttataatagaaacaccttgaccacaagcccttgattgaacattttataatatttcatctacttattaaaacaaataatttcccttgggttggaggggaagtgatttcataaattaattagaaagccatctttagcatattgcttatgtctggatccatgtttctgaggaaaaagacattctcaggtgatgtatttttttcatgcattagtatgcatttttaaaaaataatgcatgtttctttaataattaattttcatcttctataagatgccatgtgaagaagttgtggaaatgtagaataaaaagctaaagctgccaaatttctgttgaactcttaaaaacagctcatgtttgtttgtcctctcgggttgtggcctagcctatttgcaatgtaatgaagctgcagggttcttgtatagctaaagcgttcaatgcatttcacgtgctgtggtggatgtgggtgctgtagacaggcttcttctcttcctgctctcaaaatacctcggcttgacatttggacagatcctgtcattgtttaagctgagcaaaaaaccacacaaaagttgtgtaagagatgagataacaaaggagcgagagaaatctcatgtgaatttccaagttttaattcgttctccatgaaggattttcatttcagtgaaagtcgcagcagaagagggaactttctggagtttttgagaatgccaaaccacatttttatcacacttctttggaaatcaatgcctttgcatagaaaatcaaattcagggaccacaaagaattttcagtgggaatgtctagtctgaggggtctgaggttgtttttactttattgtgttgtttaaatattttaaaaatatctttagcgtttggtcttttttttttctgtaaacatttaatttggtctgagaaaagctgaatgtttgggtgtgacgtttgactgaggtggattggggctgcctgtggacattagtgaacaggtggtaggcttcaggaatatccagttttaatcagttgcatttggtacagaattttgagtaatggtgaaaattgttgtctttggaaagcacaaaagaaacctggaaaggcagttcggctcaggtagctacacataacattgtgtatgattttcacttcaaagctgtctggaaggaaatgcagtcagctccagctagtactatttatgtacccagataactaagatattgtttcatggccttgccttagtcagaggcccttttctctgtcctgaacccccaggtatgggtgaaattggaaattactaatctattggaaatcagttcctgacatagtaaagtttgctttcataactgcagcaaaaaaggtcaacttgccaagtcactgctgccatgtgtgtactgtattattttcagaaaaaaatataatagtctgagtccaagttatcttgatttaaaattgatagagaaaagaaactgtcgagcaagttatataacaactaacaacattgcactttctgtatatgaaatcaatatttaaataacttatttttctccattgctgttcttaaaaacattgtaagtagctgtaatataccagtaccaatatgttcttgcaattgcttcagcccaagaaagctgtgtattgttttaaaaattgtaaaaattattgtgatgattcatttagcataaagagaggtggacggaagggttttcctatgtatcaaaacttgtctataattatgtcatctatgtacctagaaaaaagtaaataaatttcttcagttgaatatg

SEQ ID NO: 265 - DNA, 2704 bp, Homo Sapiens
agcggcttcgcgcatttcagctggcgctgcagctgctgcacagagacccacagaggccaccctcggaaccagcgcccaatgagagggcgggacctgtgttcctccacacaaagccaggcgctgggatctttgagaaccaccaccccagcctttacccttaacattccatccgaggcaaaccacactgagcagccgcctgcaggcctgggagcaaggctacaggaagcaggtgtttccatccctcccaggcgaggccgcccaacaccaacactggagaagaagaaaaaacctcatttgatggcggaagatgaaccttcaggggccctcttgaagccgctggtttttcgcgttgacgagaccaccccggctgtggtgcaaagtgtcctcctggagagggggtggaataagtttgataagcaggagcagaacgcggaggactggaacctgtactggagggcatcctctttccgaatgaccgaacacaacagtgttaaaccgtggcagcagctaaaccaccaccctggaaccaccaagcttaccaggaaagactgtttggccaaacacctgaagcacatgaggaggatgtatggcacttccctgtaccagttcatccccctgacgttcgtcatgcccaatgactataccaagttcgtggctgaatactttcaggagaggcagatgctgggcaccaagcatagctattggatttgcaagcctgctgagttatctcgtgggagggggatactaattttcagtgactttaaagacttcatctttgatgatatgtacatagtgcagaaatatatctccaatcctttacttattggcagatataaatgtgatctccgcatctatgtttgtgttactggctttaagcctttgaccatttatgtttatcaggaagggttggttcggtttgccacggaaaagtttgacctcagtaatttgcaaaacaattatgcccatttgaccaacagcagcatcaataaatccggggcctcttatgagaagatcaaagaagtgattggtcatggttgtaaatggacgctcagcagatttttttcctaccttcgtagctgggatgtggacgatctgcttttgtggaagaaaatccaccgcatggttattctcaccattctcgccattgcaccatctgtcccctttgctgccaattgctttgagctctttgggtttgatattttgattgatgacaacttgaaaccatggcttttagaggtcaactacagcccagccttgaccttggattgttcaacagatgtgttggtgaagagaaaacttgtccatgatattattgacctgatttacttaaatggtctaagaaatgaggggggagaagccagtaatgccacacatggaaattccaacatcgatgctgcaaaaagtgacagaggtgggcttgatgctcctgactgtcttccttatgattctctttcgttcacaagcagaatgtacaacgaggatgactctgtggtggagaaagctgtgagtgtgcgtcctgaagctgcacctgcctcccagctggaaggagagatgagtgggcaggattttcatctgtcaacaagggagatgccacaaagcaagcccaagttacggagcaggcacacgcctcacaagacactcatgccctacgcgtccctcttccagtcgcactcctgcaagaccaagacctccccgtgtgtcctgtcagaccgtggcaaagctccagatccccaagcaggcaactttgttcttgtttttcctttcaatgaagcaactctcggagcttccaggaatggattaaatgtcaaaagaataatccaagagctccagaaactaatgaataagcaacattcctaagtggtaaaaaatcaaatcaagaaaaagtgacatggatttttaaaaaccaaggatcctgtcctagagaaagcaatagttcaagtccctacctgtgccaccagcatgttaactatgacattgggactgaagatgtggccatatgtataaatataacagctctgacaaagcacaatatgttcaagtggtgattaaactacattacatcccatgtttatttgctcaggtgtcttgaaagaattctacaaataccacacagcctcccaccgagtcttgctctgtcgccaggctggagtgcagtggcgccatctcggctcactgcaacttccgcctcataggttcaagtcattctcctgcctcagcctcctgagtagctgggactacagcaaaaatctgcaattggcatttcccatgtgatgctgcgtgttgagggctcatctgcttctcgtccaggacgacatttccagcttcatctttgatcttaaccctcccggaggcatacttggtttcctgacagccgctgcaatacacagtcttgacggtgccatccgggtactccctcctcttgaaccgggctgtgtggatttctttctgcccgttgctgagcacaatggttttgtcgccgttcctgagaggagaaacacatggaaataaggtctcttcctgtccatccttgagatgttccaccgtcccgtcgggaaacacgatttctttggagccattggggtagaatttttctgcagaatgcagtttttcagtatatgttacattgaatctgtttagaaacatgttctatgcaaataatctataaaatattcatgagatttaaaaaagaaaaaaaaaaaaaaaa

SEQ ID NO: 266 - DNA, 1961 bp, Homo Sapiens
acgcgggggcgcctcttcacgaggtggaaacaagatggaggattcggcctcggcctcgctgtcttctgcagccgctactggaacctccacctcgactccagcggccccgacagcacggaagcagctggataaagaacaggttagaaaggcagtggacgctctcttgacgcattgcaagtccgggaaaaacaattatgggttgcttttgaatgagaatgaaagtttatttttaatggtggtattatggaaaattccaagtaaagaactgagggtcagattgaccttgcctcatagtattcgatcagattcagaagatatctgtttatttacgaaggatgaacccaattcaactcctgaaaagacagaacagttttatagaaagcttttaaacaagcatggaattaaaaccgtttctcagattatctccctccaaactctaaagaaggaatataaatcctatgaagccaagctccgccttctgagcagttttgatttcttccttactgatgccagaattaggcggctcttaccctcactcattgggagacatttctatcaaagaaagaaagttccagtatctgtaaaccttctgtccaagaatttatcaagagagatcaatgactgtataggtggaacggtcttaaacatttctaaaagtggttcttgcagtgctatacgtattggtcacgttggaatgcaaattgagcacatcattgaaaacattgttgctgtcaccaaaggactttcagaaaaattgccagagaagtgggagagcgtgaaactcctgtttgtgaaaactgagaaatcggctgcacttcccatcttttcctcgtttgtcagcaattgggatgaagccaccaaaagatctttgcttaataagaagaaaaaagaggcaaggagaaaacgaagagaaggaaattttgaaaaacaaaaggagaggaagaagaagaggcagcaggctaggaagactgcatcagttcttagtaaagatgatgtggcacctgaaagtggtgatactacagtgaagaaacctgaatcaaagaaggaacagacgccagagcatgggaagaaaaaacgtggcagaggaaaagcccaagttaaagcaacaaatgaatccgaagacgaaatcccacagctggtaccaataggaaagaagactccagctaatgaaaaagtagagattcaaaaacatgccacaggaaagaagtctccagcaaagagtcctaatcccagcacacctcgtgggaagaaaagaaaggctttgccagcatctgagaccccaaaagctgcagagtctgagaccccagggaaaagcccagagaagaagccaaaaatcaaagaagaggcagtgaaggaaaaaagtccttcgctggggaaaaaagatgcgagacagactccaaaaaagccagaggccaagtttttcaccactcctagtaaatctgtgagaaaagcttcccacacccccaaaaaatggcccaaaaaacccaaagtaccccagtcgacctaaagtcagtgattcaactggaaggaaacctcaatgctgcctccagagctttttggaaatactcagatcctggccgcctttgtaaccttctctaaacgtcaggcctggacttaaaagattttttaaaacctccataagtagtccaggggcggtggctcacgcctgtaatcccagcactttgggaggccgaggcaggcggatcacaaggtcaacgagatcgagaccatcctggccaacatggtgaaaccctgtctgtaccaaaaatacaaaaattaattgggcatggtggtggacacctgtaatcccagctactagggaggctgaggcaggagaattgcttgaacctgggaggcggaggttgcagtgagccactgcactccagcctgatgacagagcaagactcagtctcaaaaataaataaaaataataaaacctcaaaaaaaaaaaaaaaaaaaaa

SEQ ID NO: 267 - DNA, 1841 bp, Homo Sapiens
cgcgcctggcggcggtggcggcagtggcagcagtggcagccgcgcagccccgcggaatggagcggcgccggggctgagccgggcgcgcacgggccgccgcatgtgccgcgcggggagcggctgccgagcgggcggagagcgagcgcgagaggccccgtcggagcggccgccggagcagcgccggagatgggagaacagcccatcttcaccacccgagcgcatgtcttccagattgaccccaacaccaagaagaactggatgcctgcgagcaagcaggcggtcaccgtttcctacttctatgatgtcacaaggaacagctatcggatcatcagtgtggacggagccaaggtgatcataaacagcacaatcacaccgaatatgaccttcaccaaaacgtcacagaagtttgggcagtgggccgacagcagagccaacacagtgtttggtttggggttttcctctgagcagcagctgacaaagtttgcagagaaattccaggaggtgaaagaagctgccaagatagccaaagacaagacgcaggagaaaatcgagacctcaagtaatcattcccaagaatctgggcgtgaaaccccatcttctactcaggcatccagtgtcaacgggacggacgatgaaaaggcctctcacgccggtccagccaacacacacctgaagtctgagaatgacaagctgaagattgccttgacgcagagcgcagccaacgtgaagaagtgagatcaacagagagaaggagaagaacacgcagctgaagaggaggatcgaggagctggaggcagagctccgagaaaaggagacagagctgaaagatctccgaaaacaaagtgaaatcatacctcagctcatgtcagagtgcgaatatgtctctgagaagctagaggcggcagagagagacaatcaaaacctggaagacaaagtgcgttccttaaagacagacattgaggagagcaaataccgacagcgccacctgaaggtggagttgaagagcttcctggaggtgctggacgggaagattgacgacctgcatgacttccgccgagggctctccaagctgggcaccgataactagggctggccgaggcccaggccccgcccgtgagtcccaagcgtgtgtgcgagaccagatagctctaggacgttcttctgtgtgcattgcttctgtaaatgcaggcgcagtttgtcgtgtttccaaaccagttgtgccgtccactcactccttttcagaatagaaatctcctctcgcttctctggccttgtgaggttgtggacaactggaagattctgactcaggaatccagaactaggtctaccttcaacatttatgcagtcagggcagggatgtttatatctttcataagggctgttgcaaccatatgaactgaaaaaacacgcattttgtaatccaaatattgatattctttacaccaagccatcaggctccttttatcaaatagcattcagagtatttgaatgtccaccagacaccagccccggggggcacagagagaacaacattcctctctgtcaacatcgagaggctttaaaacaactgtttagtggaaactttctgagagatggaaaacaagcttctggtgggtgcattttctggcccggagttgcctgcatccacgctactgccccctgccccccgcccccccagtttgtacggttgcaacagtgttccttttcttggttttaatttctgagcagatgattgtgctgtgggaacagcacacagtgagggtgcctagcacaatgtctggcacaaagtaggtgcttaataaatatttgttcaattaaaaaaaaaaaaaaaaaaaaaaaaa

SEQ ID NO: 268 - DNA, 2450 bp, Homo Sapiens
acagaagaatagagaggctgttgcagccccgtgctttctcctgctgctggccgattgcttgctctgaactaaccctctaacccttgggagtctgtgtgcagcagtgatgtgagctgcatccgggctgaaatgggagctcccgctatggcactggctcaaggagctaatctaaagagaaagtattttggggaagacatcttggttgcacccctcattgcatcttgactaattgcttccaactccgggggcttccagggacaatctcattgttcttttctctccaagggtcagccatgttaaccatttgttaatttcttctgaacagatcaagcaaaagtagataatcagccagaagaattagtgcgtagtgctgaagatgagtgatgacagagaaacagatacagcatcagaaagcagttaccagctcagcagacacaagaagagcccgagctctttaaccaatcttagcagctcctctggcatgacgtccttgtcttctgtgagtggcagtgtgatgagtgtttatagtggagactttggcaatctggaagttaaaggaaatattcagtttgcaattgaatatgtggagtcactgaaggagttgcatgtttttgtggcccagtgtaaggacttagcagcagcggatgtaaaaaaacagcgttcagacccatatgtaaaggcctatttgctaccagacaaaggcaaaatgggcaagaagaaaacactcgtagtgaagaaaaccttgaatcctgtgtataacgaaatactgcggtataaaattgaaaaacaaatcttaaagacacagaaattgaacctgtccatttggcatcgggatacatttaagcgcaatagtttcctaggggaggtggaacttgatttggaaacatgggactgggataacaaacagaataaacaattgagatggtaccctctgaagcggaagacagcaccagttgcccttgaagcagaaaacagaggtgaaatgaaactagctctccagtatgtcccagagccagtccctggtaaaaagcttcctacaactggagaagtgcacatctgggtgaaggaatgccttgatctaccactgctaaggggaagtcatctaaattcttttgttaaatgtaccatccttccagatacaagtaggaaaagtcgccagaagacaagagctgtagggaaaaccaccaaccctatcttcaaccacactatggtgtatgatgggttcaggcctgaagatctgatggaagcctgtgtagagcttactgtctgggaccattacaaattaaccaaccaatttttgggaggtcttcgtattggctttggaacaggtaaaagttatgggactgaagtggactggatggactctacttcagaggaagttgctctctgggagaagatggtaaactcccccaatacttggattgaagcaacactgcctctcagaatgcttttgattgccaagatttccaaatgagcccaaattccactggctcctccactgaaaactactaaaccggtggaatctgatcttgaaaatctgagtaggtggacaaatatcctcactttctatctattgcacctaaggaatactacacagcatgtaaaagtcaatctgcatgtgcttctttgattacaaggcccaagggatttaaatataacaaaatgtgtaatttgtgactctaatattaaataagatatttgaacaagctaggaaaattgaatttctgctgctgcttcaaagaaaaagctgccccagagcattaaacatggggtattgttaagaagcaaaatgttcttgtttgccatcatgtgtttcacaccacaattctgtgccacagttaagagggtctggtacccttgcaggacctttgtaggttgtgggaaaaagtcgcagaaagatactcaaagtggagcagggaatggagacagacatcagtgatgataaaaaaaaaaatggaccttaagaaactatttactctgtaatctctaataaaatatggaattccatattagggcaatgagactgaaactactggtgtttttctgccttgagaaaacaaacagttaaaacaagcctcaaatgtattttagtgccacccactggccataggtacaattcagttgttggcttgttttgacttaattctaaaataggtctcaagcctgtatttttatgagtttatttttttaaaaccctgcatatatatgattgtttttcttataactttactatatgaaagcagcataagagtagtcacaaacatgttttgcaacaaagttttaattagaatgtaagttgctcagttatactgttcttcttatgtatgtaaaattttcgtattttgtaaaaacccttagaataaattatcatttgatttaaattgtattagaaaattagcgtgacttctcattttaaataaaatattttaggaattctaaacatctaaaaa

SEQ ID NO: 269 - DNA, 3260 bp, Homo Sapiens
ctggagagtaaaaagaactgggggtaagagcccctctgcctagcactgctcccccaaggctcccagaaatctcaggtcagaggcacggacagcctctggagctctcgtctggtgggaccatgaactgccagcagctgtggctgggcttcctactccccatgacagtctcaggccgggtcctggggcttgcagaggtggcgcccgtggactacctgtcacaatatgggtacctacagaagcctctagaaggatctaataacttcaagccagaagatatcaccgaggctctgagagcttttcaggaagcatctgaacttccagtctcaggtcagctggatgatgccacaagggcccgcatgaggcagcctcgttgtggcctagaggatcccttcaaccagaagacccttaaatacctgttgctgggccgctggagaaagaagcacctgactttccgcatcttgaacctgccctccacccttccaccccacacagcccgggcagccctgcgtcaagccttccaggactggagcaatgtggctcccttgaccttccaagaggtgcaggctggtgcggctgacatccgcctctccttccatggccgccaaagctcgtactgttccaatacttttgatgggcctgggagagtcctggcccatgccgacatcccagagctgggcagtgtgcacttcgacgaagacgagttctggactgaggggacctaccgtggggtgaacctgcgcatcattgcagcccatgaagtgggccatgctctggggcttgggcactcccgatattcccaggccctcatggccccagtctacgagggctaccggccccactttaagctgcacccagatgatgtggcagggatccaggctctctatggcaagaagagtccagtgataagggatgaggaagaagaagagacagagctgcccactgtgcccccagtgcccacagaacccagtcccatgccagacccttgcagtagtgaactggatgccatgatgctggggccccgtgggaagacctatgctttcaagggggactatgtgtggactgtatcagattcaggaccgggccccttgttccgagtgtctgccctttgggaggggctccccggaaacctggatgctgctgtctactcgcctcgaacacaatggattcacttctttaagggagacaaggtgtggcgctacattaatttcaagatgtctcctggcttccccaagaagctgaatagggtagaacctaacctggatgcagctctctattggcctctcaaccaaaaggtgttcctctttaagggctccgggtactggcagtgggacgagctagcccgaactgacttcagcagctaccccaaaccaatcaagggtttgtttacgggagtgccaaaccagccctcggctgctatgagttggcaagatggccgagtctacttcttcaagggcaaagtctactggcgcctcaaccagcagcttcgagtagagaaaggctatcccagaaatatttcccacaactggatgcactgtcgtccccggactatagacactaccccatcaggtgggaataccactccctcaggtacgggcataaccttggataccactctctcagccacagaaaccacgtttgaatactgactgctcacccacagacacaatcttggacattaacccctgaggctccaccacccaccctttcatttcccccccagaagcctaaggcctaatagctgaatgaaatacctgtctgctcagtagaaccttgcaggtgctgtagcaggcgcaagaccgtagatctcaggcctctaacacttccaactccagccaccactttcctgtgcattttcactcctgagaagtgctcccctaactcagatcccctaacttagatttggcccccaactccatttcctgtctgtcttagacagcccttccaactgtgtcatctcttctctggaggtcaatggtggagggagatgcctgggtcctgttcttcctacataaaatgcaagaaaacagcatggccagtaaactgagcaagggccttggaatccttgagaatcacatttatgtgcttatgattacgggcaagctaattaaccttgttgaatctcagattccccatttgcaacattaggttaagaccagtactgcaggattgttgcactaaatgaaatactgtatgtgaagtgcctggcacagtgtctggtacatttgtgtttaataaaagctaactccatgttcataagagaggactgaacagctcttcctctagctgtctggctgtataactcttacagtagtctgtataataagggcatctctattagatctttaggggacagaggatttgtcaagatggttagctctttgttttggggtgcagagaaagaaaagagcagcaacagcagaggctggactccctggttcagtatttaatgccattttattcacatgctcccatgttctccctccctcccattgtagccttgctgcccaggggagggatatgtcttcctttatgcatctgggaaaccaggaacagaccctgcgcaggagagtcagagggggaagagttagaatgggtcagtggctggaacaaagttctggttaaggaggaaattagtgccacccacggtgagaagcagagaaggcacttgcatcctatgcagccctgaagaccaggctcctttgggcaaaaggcaagactctggcaggtgggtcaatgctctctccttggagcaagaagccagcttttggggaaggcaggtcctgaggcaggcactgccctgtggtcttccccaggttgaggagagaagtggaagccccatggaagacagtgctcccagctgaggtaggaggcggaggtgggggtgggggtagtttaagcctatggggcccagggggaaaggccaaacagaaacccaactaccccctaatgaagggcctggaggttggggtatcttggagctcctcagagcccttcttcccatcaaaaaggtatcaaatgccttggaagctccctgatcctacaaaacaaaaaaatgcttatttttaccactgtgaggcaagctgaggtgaacatttaaaaggctatttcaagacgaggtgcggtggctataatcctagcactttgggaggctgaagcaggaggatcacttgagcccaggagttcaagaccagcttgggcaacatagggagaccctgtctctgcaaaaaaataaaaacgaatacataaaaattaaaaaaaaa

SEQ ID NO: 270 - DNA, 3088 bp, Homo Sapiens
tttcgcaccatgactagcctctacggttccatccaccccgcggactcggtgtacctcagcacccgcacccacggcgccgtcttcaacctcgagtactcgcccgacgggtcagtgctgacagttgcttgtgaacaaactgaagttctgctttttgaccctatatcttcaaagcacataaaaacactttctgaagctcatgaagactgtgtaaataatatcagatttcttgataaccggctgtttgctacctgctctgatgacactacaatagcactatgggatctgagaaaattgaacaccaaagtatgcactttacatggtcacactagctgggtgaagaacatcgaatatgatactaatacaagactcttagtaacatcaggatttgatggaaatgtcattatttgggacactaacaggtatacagaagatgggtgtccacataagaaattctttcacacacgttttctcatgcgaatgaggttaacaccagattgttccaaaatgttgatttcaacgtcctctggatatctcttaattttgcatgaccttgacttaactaagtctttagaagtaggcagctatcccattttaagagcaagaagaactacttcaagttcagatttgaccacttcatcaagttcatctggtcctagagtttctggctcaccttgtcatcatagtgattctaattcttctgagaaacacatgtcacgagcctctcaaagagaaggagtttcaccacgaaatagtcttgaagtcgtaacccctgaagttcttggtgagagtgaccacggaaactgcatcacgtccttacagctgcacccaaaaggctgggccactcttcttcggtgctcaagcaacagtgatgatgaggagtgtacttgtgtctatgaattccaagaaggagctccagtgcgacctgtctcacctcgctgttctctacgactgactcattacattgaagaagccaatgtaggcaggggttacatcaaagaactttgcttcagccccgatggacgaatgatttcttccccacatggctatgggattcgcttgttgggatttgacaaacagtgcagtgaacttgttgactgcttgcccaaagaagccagtcccctgcgggtgatccgttctctgtactctcataatgatgtggtactgacaacaaagttctctccaacacattgtcagattgcctcagggtgccttagtggacgggtttctttgtatcagccaaagttttaggcacaacttacatcaaataaggaactcttctggtgtttgacttaggaattgcttcaatttagatgaagtattttctttttagaagatcttataagtttgggtcaagatcctggttcttatgggtccatgaacacacttgtgaccttagtacttggtcatccagcatcatacaggcatctccaagttagactctatgcagcatcatcttttgcagcattcctctgctcctgctgatctgtgccactgaactccagttcttctggtcattttgcatggtagctcttgtcacgttccttccttcctcactctctatttctctttccctctccctgtccctctctttctttgtgtttgttgattttggtgtcaattttgtggacatttggcaggagttttgactggggtaggagaaacccatgacattagaattgaataaaacctagaagttggatattggcatattggttgttgaaaaataaatttcatcctcacttatgagtatacttggccttttaaagttactgttatgtttatctatattgagcacagataatggcattattcttataattgttaagatagtcttgcaacaaaatgtcttttaagtttcctgttaaaattataaaaagattttcatggtgagagggattttattgtgaaattctagaaaaaaatattaccacctctctttgtaatttactttacttgtatgaatttaacatctctagcatgtatccttacttgatattttgttcctatcaacagcattagaaaggaaaggagacagaatgagctttggttatttctattgcacagaaaaggatttttaaaattagattagtataatatctggccatagagtgataagaacaatatgacttagattttctgtatttcatctgccagattatttgaatcacacaggatgatgtgttaacagtattagggtggaagaggaatcaagagtaaagaggtaggggtttactcatttttcttccctgagccaggtgtgacaagccaactctgtcaccattcgtgaggggagagttgcagtcctcttcaagctgttatcataagtacagtagtcagctacttggatatcaagactaagtgctgatatgaagacttgcctttgtgttttgttatgaaacacgcaagcataaagcaggactcaagcacaaggctgactgttctactttgaataacagcttccttgcagtctcctccacatgggtggtactgtgtttagaagggattaccaaaggctggagcgatttaagctatgcactagccttgccctcttaggttgcattctctttaggccactggttctcaaacattagggtgcactgtaaccattacagagcttgtgaaaagtgcagaaacctgagcctcaccttatgagattctgattcagccagggggaggacaggaatctgtatttttcatagcaacctcaagtaatctttattctgagggtctcgggattgcaggttgaaaaacacaaccttaatcagcagtaaattcttctctactcggccaggcgcagtggctcatgcctgtaatcccagcactttgggaggccgaggtgggtggatcacaaggtcaggagttcgagaccagcctgaccaacatggtgaaacgccatctctactaaaaatacaaaaattagccgggcgtggtggtgctcacctgtaatcccagctacccaggaggctgaggcaagagaatcacttgaacccgggaggcagagggtgcagtaagccgagattgcaccactgcactccagcctaggcgacagagcgagactctgtctcaaaaaaaaaaaaaaaaaaaaaaa

SEQ ID NO: 271 - DNA, 3025 bp, Homo Sapiens
actgctccttctctcacgccaactgagtctcttgatctgtacatgcaatcccaggcagctcgcgaacacaaacccggggccagccgcctactgctgctgctgctgctgccgctgccgccgccgccgccgccgctgcctccgccggctctgcgaacccgggacttttcatgcaccacactctccgcctgcttccctccgtgtcctgaaaagtgcgaccgttctcccaaggaatttccacggcaagtcttaggagggaatgattccccagtaatattccctgccctgacccaaagtgctggttggcctccctcccagggaagactgcttcttgcgtaacgccggccacagaaagagactccgatggacttacaccgggcagccttcaagatggagaactcatcctaccttcccaaccctctggcatccccagcactgatggtcctggcatccacggctgaggccagccgtgatgcttccatcccttgtcagcagccacgaccctttggtgtacctgtctcagttgacaaggacgtgcatattcctttcaccaacggttcctatacctttgcctctatgtaccatcggcaaggtggggtgccaggcacttttgccaatcgtgatttccccccttctctactacacctccaccctcaatttgctcccccaaatctagattgcaccccaatcagtatgctgaatcatagtggtgtgggggctttccggccctttgcctccaccgaggaccgggagagctatcagtcagcctttacgccggccaagcgacttaagaactgccatgacacagagtctccccacttgcgcttctcagatgcagatggcaaggaatatgactttgggacacagctgccatctagctcccccggttcactaaaggttgatgacactgggaagaagatttttgctgtctctggcctcatttctgatcgggaagcctcatctagcccagaggatcggaatgacagatgtaagaagaaagcagcggcattgttcgacagccaggccccaatttgccccatctgccaggtcctgctgaggcccagtgagctgcaggagcatatggagcaggaactggagcagctagcccaactgccctcgagcaagaattcccttctgaaggatgccatggctccaggcaccccaaagtccctcctgttgtctgcttccatcaagagggaaggagagtctccaacggcatcaccccactcatctgccaccgatgacctccaccattcagacagataccagacctttctgcgagtacgagccaaccggcagacccgactgaatgctcggattgggaaaatgaaacggaggaagcaagatgaagggcagagggaaggctcctgcatggctgaggatgatgctgtggacatcgagcatgagaacaacaaccgctttgaggagtatgagtggtgtggacagaagcggatacgggccaccactctcctggaaggtggcttccgaggctctggcttcatcatgtgcagcggcaaagagaacccggacagtgatgctgacttggatgtggatggggatgacactctggagtatgggaagccacaatacacagaggctgatgtcatcccctgcacaggcgaggagcctggtgaagccaaggagagagaggcacttcggggcgcagtcctaaatggcggccctcccagcacgcgcatcacacctgagttctctaaatgggccagtgatgagatgccatccaccagcaatggtgaaagcagcaagcaggaggccatgcagaagacctgcaagaacagcgacatcgagaaaatcaccgaagattcagctgtgaccacgtttgaggctctgaaggctcgggtcagagaacttgaacggcagctatctcgtggggaccgttacaaatgcctcatctgcatggactcgtactcgatgcccctaacgtccatccagtgttggcacgtgcactgcgaggagtgctggctgcggaccctgggtgccaagaagctctgccctcagtgcaacacgatcacagcgcccggagacctgcggaggatctacttgtgagctatctgccccaggcaggcctcgcctccagcagccccacctgcccccagcctctgtgacagtgaccgtctccctttgtacatacttgcacacaggttccccatgtacatacatgcacatactcaaacatgcgtacacacacacacatttacacacgcaggactctggagccagagtagaggctgtggcccaggcactacctgctggctcccacctatggtttgggggccatacctgttccagctctgttcccagggtggggcagggaggtgggggttgggggagtagtggggcacggctcctaagatccagcccccatactgacagacggacagacagacatgcaaacaccagactgaagcacatgtaatatagaccgtgtatgtttacaatgttgtgtataaatgggacaactcctcgccctctacctgtcccctccccctttggttgtatgattttcttcttttttaagaacccctggaagcagcgcctccttcagggttggctgggagctcggcccatccacctcttggggtacctgcctctctctctcctgtggtgtcccttccctctcccatgtgctcggtgttcagtggtgtatatttcttctcccagacatggggcacacgccccaagggacatgatcctctccttagtcttagctcatggggctctttataaggagttggggggtagaggcaggaaatgggaaccgagctgaagcagaggctgagttagggggctagaggacagtgctcctggccacccagcctctgctgagaaccattcctgggattagagctgcctttcccagggaaaaagtgtcgtctccccgaccctcccgtgggccctgtggtgtgatgctgtgtctgtatattctatacaaaggtacttgtcctttccctttgtaaactacatttgacatggattaaaccagtataaacagttgaaaaaaaaaaaaaaa

SEQ ID NO: 272 - DNA, 3957 bp, Homo Sapiens
agctggccgggcgggggggctgacccccccatctccctcccagacggggtggctggccgggctgaggggctcctcacttcccagtaggggggggcgggcagaggcgcccctcacctcctggacggggcggctggccgggcagggggctgacccccccacctccctcccggacggcatggctggccaggcggggggctgaccccccacctccctcccggatggggcggctggccgggcggagggctaaccccccccacctccctcccggacggggtggctgctgggcggagacgctcctcacttcccagatggggtggctgccgggcggagaggctcctcacttctcagacggggcggctgccgggcggaggggctcctcacttctcagacggggtggttgccaggcagagggtctcctcacttctcagacggggcggccgggcagagacgctcctcacctcccagacggggtctcggccgggcagaggcgctcctcacatcccagatggggcggcggggcagaggcgctccccacatctcagacgatgggcggccgggcagagacgctcctcacttcctagatgtgatggcggctgggaagaggcgctcctcacttcctagatgggatggcggccgggcggagacgctcctcactttccagactgggcagccaggcagaggggctcctcacatcccagacgatgggtggccaggcggagacactcctcacttcccagacggggtggcggccgggcagaggctgcaatctcggcactttgggaggccaagggtctgacagtttgatttttaaaggccaaatctctccagactccaaagaactctgtagccaaacagcagcacatactaatcaggcctgcctgtccttagagcagcagcatagaagcctggagacatggacttccatcccatattcacattcaacagcaaaataaatccaaatataaggcagtgctacaattcaaagactgtctgagatcagatgagattgggcatgttcagcgtgatacgggtagagatgttccctcactccactggcccacagccacatgcagaccaaccctgaagaatacacccaagcggtctgcactcagatcaaaccctgatctcccacaactacatcaacacacaaacaaccaccagaatacaatctaactgctgcaacaataagcaagtcccaagagagtccaaactgaaacagttgagttgctttctccctgtttgttgggctagttcaatctgcaaatggagattccttcggaatttctcaaattgagaaaagcagatcctgctgtctggacccacaaatgacactcacttatccagacacatactcaattactaacaagccccaagagtgtctgaactggaacagtcagggtgcttcctctctccgtcagttggccttgctgaacttgccaatggaaattccttcagaatttctcaaattgagaggagccattcccactgtcggtatccacaaaagacactcacctatccacatgcagaagtcaaatttgaaaggctgttcttcctaggcaatcagaaatgtggttggggctggcagcagcaatgctaaatagaaagactaaaacccacatcctgcctaaaacacataggctgctgcttagggttgcggaaattctcccaactggtgacagccaagccaagagcaatgtcttcctgatgagggaaccaaaatctgttactgaaatgccagaggttcagcctaggtcccgttactcattgcacagaatgccaatcactgaggcaagtatttccaggggagatgactttattcagttgctgcagctgagaagaactgcagatcagtctcaaattcatctccccaagtgactgaaattgggggtttacatagcagaggagggatgtagctacgtgcaggaaataatgtagctatgtgtgggaaaacagaatttgaatttcagggcaacaggagatttgatggggaatgaacaccccacagctctgtgcaggagtgcctggaagtgaggccagtcaagggaatgctgccagacaaccaactcagcttcagaccatcttcagatcgtaacccaccagggactgtgggctttgccagaccacatttttggttactgcaactcaagttggcttctaaatctcaaaaaatgtgacaatgatacagatttttttatctacttttgtctaaaacatttaaatactcattctgaagtaactcatctcaaaatccaatgctagaaaaatggaaataattacaggcagatgcaatgatttaaaggtttaaaagaagctgtccattctaaagagtcagaggaaacctttccttatgaaatggttaatgaaataaataggaaaaaaaaatccaacacaatcacgaggttccagaaaacattgtatatttatttaaaaagtaattttgtatgaatgaaatatttcttaaggttctgcctttctttccttccactcaacaggaaacaaaattactggatttatggtcaaggaaaatcactaacccacagccctcagatgcactcatgaaaatgggaagaatgcatacacagggatcagagaacagagaaacaggtgaatcttgtggttggaaagaaacgcacttttgtatgtacacacagaattaactttacttttccactaagctctctctgagacttagaaatccctacatctgggtaggctggagtcaatcccaaggcttttatggttccttgaagtaaaaagagcagtctcatgtcagaaattaataggtccagtctagcacagtattgaaactccaaacttcaatttaaactctacttggaagcctgcagaagaggaggcaggcggttttgctgcctctttttttccctagcatcatcaaatcctctattcattggctgctgtttcttaaacatttcatgggaaagagaaatagaagcacagatatctgctgttaatggttctttctcttaccaagtgctgttgggggtttttcagaagtcacatcatatgactgaaacttatctcctgtctgatttctcctcaacttttgggattctacagattctcaccattaggatttcagtgtctggcagtcctctgggaaactactttttaaaaattatggtaaaatacacataacaaaatttttcatcttaaccatttttaagtgtaaatttcagtagtaagtacattacattgttttgcaatcaatctccagaactattttcatcttgcaaagctaaaactctgtatctgtcaaacaatgactccccatttcctctttcccccatcacttagccaccaccattctactttctgtttctatcagcttaagtcttctaagtaactcatgtaagtgaaatcatacagtacttgtccttttgcgactggcttattccgcatagcataaagccttcaatgtttatttatgttgtagcttgtgtcagaatgtccttcctttttaaagctgaataatattccattgtatgtatataccacatttttttagtccacccatcgatggacaccagggttgctttaacctgttgacttgtgaataacgctgctatgaatatggctgtataaatctcttggagataacctgctttaattattttggctatatatccagaagcaaaagtgccaggttataatttaatgtttaatttggcggggggaaccaccatattgttgtctgtagtggttgcattattttacattgccatgaaaatttcactagggttgcaatttacccatatccctatagtatttgttattttctgggttttttttttccacaggagccatcttaatggatgtgaggtgatctcttaatatagttttgattttaatttctcaaatgattagtgatattgaatgtcttttcatatgtttgctggacatttgtttatgttttatgaagaagtatctattcaagtc

SEQ ID NO: 273 - DNA, 1732 bp, Homo Sapiens
gtgagcgccgggctcggggcccccccggccgcccgccccctcccctccctccctcccctcccctcccctcccccccgggccccgcgccccccccgcccccgccccccccatggacatgctggacccgggtctggatcccgctgcctcggccaccgctgctgccgccgccagccacgacaagggacccgaggcggaggagggcgtcgagctgcaggaaggcggggacggcccaggagcggaggagcagacagcggtggccatcaccagcgtccagcaggcggcgttcggcgaccacaacatccagtaccagttccgcacagagacaaatggaggacaggtgacataccgcgtagtccaggtgactgatggtcagctggacggccagggcgacacagctggcgccgtcagcgtcgtgtccaccgctgccttcgcgggggggcagcaggctgtgacccaggtgggtgtggacggggcagcccagcgcccgggccccgccgctgcctctgtgcccccaggtcctgcagcgcccttcccgctggctgtgatccaaaatcccttcagcaatggtggcagtccggcggccgaggctgtcagcggggaggcacgatttgcctatttcccagcgtccagtgtgggagatactacggctgtgtccgtacagaccacagaccagagcttgcaggctggaggccagttctacgtcatgatgacgccccaggatgtgcttcagacaggaacacagaggacgatcgccccccggacacacccttactctccaaaaattgatggaaccagaacaccccgagatgagaggagaagagcccagcacaacgaagtggagcggaggcggagggacaagatcaacaactggatcgtccagctttcgaaaatcattccagactgtaacgcagacaacagcaagacgggagcgagtaaaggagggatcctgtccaaggcctgcgattacatccgggagttgcgccagaccaaccagcgcatgcaggagaccttcaaagaggccgagcggctgcagatggacaacgagctcctgaggcagcagatcgaggagctgaagaatgagaacgccctgcttcgagcccagctgcagcagcacaacctggagatggtgggcgagggcacccggcagtgacgcccgccaccaccacgcagccgccgccgcccacgccggcctctgctgcccccttccccagcccttagcacagagagggacacatgcccctcccccagctgcgtttttttatagtagatttttaacaaaaaacggggagaaataatgcatttctgtggatacagtgcccaccgccctcctccacttggaaacggtatcctccctgcccatccgtctgtctgtcgcccttctcccggccctcactaagccccggcacttctagtggtctcacctggaggcaagagggaggggacagaggccctgccacgtcccgctgcctcctgctctctggaggtactgagacagggtgctgatgggaaggaggggagcctttggggggccacccggggcctggacctatgcagggaggccacgtcccaccccacctcttgtttctgggtccctgctcccctttgggggtgtgtgtgtgtgttttaattttctttatggaaaaattgacaaaaaaaaaatagagagagaggtatttaactgcaataaactggccccatgtggcccccgcaaaaaaaaaaaaaaaaaaaaaaa

SEQ ID NO: 274 - DNA, 3165 bp, Homo Sapiens
cttcctcctcctcctcctcctcctcctccctcctcttccccaccttcctccactccctcccttcccctccccttctacctcctcctcggccagctcaggttgcagcttctctggggaactgctcacctttccggagcaggggaagctgccccgtgcccgggagggagcgggcgcaccgcggcccccaggacacgcgctgacccggctgcccagtccctcatgatcatgaacaagatgaagaactttaagcgccgtttctccctgtcagtgccccgcactgagaccattgaagaatccttggctgaattcacggagcaattcaaccagctccacaaccggcggaatgagaacttgcagctcggtcctcttggcagagaccccccgcaggagtgcagcaccttctccccaacagacagcggggaggagccggggcagctctcccctggcgtgcagttccagcggcggcagaaccagcgccgcttctccatggaggtgagggcctctggagctctgccccggcaggtggcaggatgcacgcacaagggtgtgcacaggagggcagctgccttacagccagactttgacgtcagcaagaggctctctctgcccatggatatccgcctgccccaggaattcctacagaagctacagatggagagcccagatctgcccaagccgctcagccgcatgtcccgccgggcctccctgtcagacattggctttgggaaactggaaacatacgtgaaactggacaaactgggagagggcacctatgccacagtcttcaaagggcgcagcaaactgacggagaaccttgtggccctgaaagagatccggctggagcacgaggagggagcgccctgcactgccatccgagaggtgtctctgctgaagaacctgaagcacgccaatattgtgaccctgcatgacctcatccacacagatcggtccctcaccctggtgtttgagtacctggacagtgacctgaagcagtatctggaccactgtgggaacctcatgagcatgcacaacgtcaagattttcatgttccagctgctccggggcctcgcctactgtcaccaccgcaagatcctgcaccgggacctgaagccccagaacctgctcatcaacgagaggggggagctgaagctggccgactttggactggccagggccaagtcagtgcccacaaagacttactccaatgaggtggtgaccctgtggtacaggccccccgatgtgctgctgggatccacagagtactccacccccattgatatgtggggcgtgggctgcatccactacgagatggccacagggaggcccctcttcccgggctccacagtcaaggaggagctgcacctcatctttcgcctcctcgggacccccacagaagagacgtggcccggcgtgaccgccttctctgagttccgcacctacagcttcccctgctacctcccgcagccgctcatcaaccacgcgcccaggttggatacggatggcatccacctcctgagcagcctgctcctgtatgaatccaagagtcgcatgtcagcagaggctgccctgagtcactcctacttccggtctctgggagagcgtgtgcaccagcttgaagacactgcctccatcttctccctgaaggagatccagctccagaaggacccaggctaccgaggcttggccttccagcagccaggacgagggaagaacaggcggcagagcatcttctgagccacgcccaccttgctgtggccaagggacaagagatcacatggagcacaaattcgggtaggatggagcctgtgtggccctcggaggactgaagaacgagggctgacagccagcctggaagaccgcttggcagcccttctggccacggctgtttcttctttgtgcttcccgtgtgcctccccagtagccctcacctgcataccaacccctcctttacccacgttggggctggcataagctgcttccctgagaggacatgaggggggggcggtcctcgtaccctctcccaccctggtgtttgggcacctgcgtgggatgcacacggatgacagaatcaaggcgccaggatgggcactctgccctggatacaggctctaccctcctcccccaggacctgcctagtgccagtttggtagtccccctttctggccccttggagcccacacacgtttcatctttttcccctctgagagcaagaagagacatggcatgttctctgggaccctggaatcctaggtacccacatgtgtgccaaagcctaccccacctggcaggtgtcccacagcaacagaaggaatagtagtccccactctttccatcagccctaccctaccctcattccccgacaccctctggcttgaaccatggctgagcagtgccggcatacgctttgctggcatgcttggatgcccagctgtgtccagaggtggcctgggaccgccagttgcacgcctgccacctcagccagcccccgcccagctcatcagtctgaatggagttgccttaaattggcaggtggtaccgtactcactgcccttggagctgtgaccggctcctgcctgtccaccccttcccgaggtggctcctgcttaccttatcatcccagggctctgattagccaggcctggtcagggtcctggggacggcacccagatatgcagagtcaccctgacactggtgccaggctgacctcagctcccgaaggctcgcacagcctccccatccttccttcccagcccttgtggctctgtccacctgatcccaataccagcttcccccagcccctgccaccccagagggcggccacgacagggagaggtgtagatgccaccatctgagggagaggaacgtggaacaggagcaggctctgatgctgagaggcttgcctccgggggctggaagcctgggtggccggggcccctgaagaaggctcccctctgtatcccccaggtctcctcaacactgggctgatcctgaatggcacaggccaaggggaggccagcctcgcctttctacccaggccccctgccctgcccacctcaggcccccaccctccactcctccccacggtactgtgaacgtcgtgtgactcagtgcagagacagataatatatttaattcatgtacagaaaaaaaaaaaaaaaaaaaaaa

SEQ ID NO: 275 - DNA, 2738 bp, Homo Sapiens
tcgcacttccgtgtgccgcggcgccggagcccgaggcggctgtagcccacatctcccgagcgacccccggcgcccgcccgccgcgcggaggcccgggccacacctcactggccgcttggcccatcccagtcagcgccgcgccgaaccccgtccgcgcgcgccggggagcggcgcccccgccgctgccgccgcgacccttggcgcctgcccctgcaacgggagccccactgcaggccccaccatggcgccgttcctgcgcatcgccttcaactcctatgagctgggctccctgcaggccgaggacgaggcgaaccagcccttctgtgccgtgaagatgaaggaggcgctcagcacagagcgtgggaaaacactggtgcagaagaagccgaccatgtatcctgagtggaagtcgacgttcgatgcccacatctatgaggggcgcgtcatccagattgtgctaatgcgggcagcagaggagccagtgtctgaggtgaccgtgggtgtgtcggtgctggccgagcgctgcaagaagaacaatggcaaggctgagttctggctggacctgcagcctcaggccaaggtgttgatgtctgttcagtatttcctggaggacgtggattgcaaacagtctatgcgcagtgaggacgaggccaagttcccaacgatgaaccgccgcggagccatcaaacaggccaaaatccactacatcaagaaccatgagtttatcgccaccttctttgggcaacccaccttctgttctgtgtgcaaagactttgtctggggcctcaacaagcaaggctacaaatgcaggcaatgtaacgctgccatccacaagaaatgcatcgacaagatcatcggcagatgcactggcaccgcggccaacagccgggacactatattccagaaagaacgcttcaacatcgacatgccgcaccgcttcaaggttcacaactacatgagccccaccttctgtgaccactgcggcagcctgctctggggactggtgaagcagggattaaagtgtgaagactgcggcatgaatgtgcaccataaatgccgggagaaggtggccaacctctgcggcatcaaccagaagcttttggctgaggccttgaaccaagtcacccagagagcctcccggagatcagactcagcctcctcagagcctgttgggatatatcagggtttcgagaagaagaccggagttgctggggaggacatgcaagacaacagtgggacctacggcaagatctgggagggcagcagcaagtgcaacatcaacaacttcatcttccacaaggtcctgggcaaaggcagcttcgggaaggtgctgcttggagagctgaagggcagaggagagtactttgccatcaaggccctcaagaaggatgtggtcctgatcgacgacgacgtggagtgcaccatggttgagaagcgggtgctgacacttgccgcagagaatccctttctcacccacctcatctgcaccttccagaccaaggaccacctgttctttgtgatggagttcctcaacgggggggacctgatgtaccacatccaggacaaaggccgctttgaactctaccgtgccacgttttatgccgctgagataatgtgtggactgcagtttctacacagcaagggcatcatttacagggacctcaaactggacaatgtgctgctggaccgggatggccacatcaagattgccgactttgggatgtgcaaagagaacatattcggggagagccgggccagcaccttctgcggcacccctgactatatcgcccctgagatcctacagggcctgaagtacacattctctgtggactggtggtctttcggggtccttctgtacgagatgctcattggccagtcccccttccatggtgatgatgaggatgaactcttcgagtccatccgtgtggacacgccacattatccccgctggatcaccaaggagtccaaggacatcctggagaagctctttgaaagggaaccaaccaagaggctgggagtgaccggaaacatcaaaatccaccccttcttcaagaccataaactggactctgctggaaaagcggaggttggagccacctttcaggcccaaagtgaagtcacccagagactacagtaactttgaccaggagttcctgaacgagaaggcgcgcctctcctacagcgacaagaacctcatcgactccatggaccagtctgcattcgctggcttctcctttgtgaaccccaaattcgagcacctcctggaagattgaggttcctggacagatcaggctagccctgccctccacccacacctgcccgctccccacgataagcaccagtgggactgtggtgacttctgctgctggccccgcccctgcccccagagcgtccttggctgccgtctggccgggctctcatggtacttcctctgtgaactgtgtgtgaatctgcttttcctctgccttcggagggaaattgtaaatcctgtgtttcattacttgaatgtagttatctattgaaaatatatattatatacatagacatatatatatatataataggctgtatatattgctcagtagagaaaaaccatgggggactggtgatatgttgatctttttcaaaaaaatatatatatgacaaaaaaaaaaaaaaaggagcacaagctgtttgaaccaccaggtttatttgtgtgtctaaataaacaccaaatagtaccaaaaaaaaaaaaaaaaa

SEQ ID NO: 276 - DNA, 3583 bp, Homo Sapiens
cgcggacccggccggcccaggcccgcgcccgccgcggccctgagaggccccggcaggtcccggcccggcggcggcagccatggccggggggccgggcccgggggagcccgcagcccccggcgcccagcacttcttgtacgaggtgccgccctgggtcatgtgccgcttctacaaagtgatggacgccctggagcccgccgactggtgccagttcgccgccctgatcgtgcgcgaccagaccgagctgcggctgtgcgagcgctccgggcagcgcacggccagcgtcctgtggccctggatcaaccgcaacgcccgtgtggccgacctcgtgcacatcctcacgcacctgcagctgctccgtgcgcgggacatcatcacagcctggcaccctcccgccccgcttccgtccccaggcaccactgccccgaggcccagcagcatccctgcacccgccgaggccgaggcctggagcccccggaagttgccatcctcagcctccaccttcctctccccagcttttccaggctcccagacccattcagggcctgagctcggcctggttccaagccctgcttccctgtggcctccaccgccatctccagccccttcttctaccaagccaggcccagagagctcagtgtccctcctgcagggagcccgcccctctccgttttgctggcccctctgtgagatttcccggggcacccacaacttctcggaggagctcaagatcggggagggtggctttgggtgcgtgtaccgggcggtgatgaggaacacggtgtatgctgtgaagaggctgaaggagaacgctgacctggagtggactgcagtgaagcagagcttcctgaccgaggtggagcagctgtccaggtttcgtcacccaaacattgtggactttgctggctactgtgctcagaacggcttctactgcctggtgtacggcttcctgcccaacggctccctggaggaccgtctccactgccagacccaggcctgcccacctctctcctggcctcagcgactggacatccttctgggtacagcccgggcaattcagtttctacatcaggacagccccagcctcatccatggagacatcaagagttccaacgtccttctggatgagaggctgacacccaagctgggagactttggcctggcccggttcagccgctttgccgggtccagccccagccagagcagcatggtggcccggacacagacagtgcggggcaccctggcctacctgcccgaggagtacatcaagacgggaaggctggctgtggacacggacaccttcagctttggggtggtagtgctagagaccttggctggtcagagggctgtgaagacgcacggtgccaggaccaagtatctgaaagacctggtggaagaggaggctgaggaggctggagtggctttgagaagcacccagagcacactgcaagcaggtctggctgcagatgcctgggctgctcccatcgccatgcagatctacaagaagcacctggaccccaggcccgggccctgcccacctgagctgggcctgggcctgggccagctggcctgctgctgcctgcaccgccgggccaaaaggaggcctcctatgacccaggtgtacgagaggctagagaagctgcaggcagtggtggcgggggtgcccgggcatttggaggccgccagctgcatccccccttccccgcaggagaactcctacgtgtccagcactggcagagcccacagtggggctgctccatggcagcccctggcagcgccatcaggagccagtgcccaggcagcagagcagctgcagagaggccccaaccagcccgtggagagtgacgagagcctaggcggcctctctgctgccctgcgctcctggcacttgactccaagctgccctctggacccagcacccctcagggaggccggctgtcctcagggggacacggcaggagaatcgagctgggggagtggcccaggatcccggcccacagccgtggaaggactggcccttggcagctctgcatcatcgtcgtcagagccaccgcagattatcatcaaccctgcccgacagaagatggtccagaagctggccctgtacgaggatggggccctggacagcctgcagctgctgtcgtccagctccctcccaggcttgggcctggaacaggacaggcaggggcccgaagaaagtgatgaatttcagagctgatgtgttcacctgggcagatcccccaaatccggaagtcaaagttctcatggtcagaagttctcatggtgcacgagtcctcagcactctgccggcagtgggggtgggggcccatgcccgcgggggagagaaggaggtggccctgctgttctaggctctgtgggcataggcaggcagagtggaaccctgcctccatgccagcatctgggggcaaggaaggctggcatcatccagtgaggaggctggcgcatgttgggaggctgctggctgcacagacccgtgaggggaggagaggggctgctgtgcaggggtgtggagtagggagctggctcccctgagagccatgcagggcgtctgcagcccaggcctctggcagcagctctttgcccatctctttggacagtggccaccctgcacaatggggccgacgaggcctagggccctcctacctgcttacaatttggaaaagtgtggccgggtgcggtggctcacgcctgtaatcccagcactttgggaggccaaggcaggaggatcgctggagcccagtaggtcaagaccagccagggcaacatgatgagaccctgtctctgccaaaaaattttttaaactattagcctggcgtggtagcgcacgcctgtggtcccagctgctggggaggctgaagtaggaggatcatttatgcttgggaggtcgaggctgcagtgagtcatgattgtatgactgcactccagcctgggtgacagagcaagaccctgtttcaaaaagaaaaaccctgggaaaagtgaagtatggctgtaagtctcatggttcagtcctagcaagaagcgagaattctgagatcctccagaaagtcgagcagcacccacctccaacctcgggccagtgtcttcaggctttactggggacctgcgagctggcctaatgtggtggcctgcaagccaggccatccctgggcgccacagacgagctccgagccaggtcaggcttcggaggccacaagctcagcctcaggcccaggcactgattgtggcagaggggccactacccaaggtctagctaggcccaagacctagttacccagacagtgagaagcccctggaaggcagaaaagttgggagcatggcagacagggaagggaaacattttcagggaaaagacatgtatcacatgtcttcagaagcaagtcaggtttcatgtaaccgagtgtcctcttgcgtgtccaaaagtagcccagggctgtagcacaggcttcacagtgattttgtgttcagccgtgagtcacactacatgcccccgtgaagctgggcattggtgacgtccaggttgtccttgagtaataaaaacgtatgttccctaaaaaaaaaaaaa

SEQ ID NO: 277 - DNA, 4199 bp, Homo Sapiens
tggggcgggctgatgagcacctggattttcacccggcgtgctggtaattcctacacttgtgggtgtttgagagacatgaagaggggaggatgacctcttcccggaagcgggacttccataaaagaagcgtggtgggcgggtcccgggcacctgtggtttggtgagtcctccaggtaactgtgatgcgggggtcagcgggagaggcacccggaagctcccggcgtctgcaccccggcagcgcgaggaaatgcccaaagaaactatagtgacactgaaactgaaggagagatttttaattccttagtgcaatactttggtgacaacttggggcgaaaagttaaagcgatgccattagttgaagaaacttctttattggaagattcgtcagtgacttttcctgtggtaataataggaaatggaccctcaggaatatgcctttcttatatgttatcaggctacagaccgtatttatcatcagaagcaatacacccaaatacaatcttaaatagtaaattagaagaagcaagacatctttccattgttgatcaggacttagaatacttgtctgagggccttgagggccgatcatccaatccagttgcagtacttttcgatacacttcttcatccagatgctgactttgggtatgattatccatccgttttgcattggaaattagagcaacatcattatatccctcacgtagttcttggtaaaggtccacctggtggggcttggcataatatggaaggctccatgttgacaatcagctttggaagttggatggaactacctggacttaaatttaaggactgggtatcaagtaaacgaaggagcctaaaaggggatcgagttatgccagaggaaatagctcgctactataaacattatgtaaaagtcatgggtcttcagaagaatttcagagagaatacttacataacttccgtatcaagactctacagagatcaagatgatgatgatattcaagacagagatatttcaacaaagcatttacagatagagaagtcaaactttatcaagagaaactgggaaattaggggttatcagcgaatagctgatggttctcatgttcccttctgcctctttgctgagaatgtagcgctggcaactggaacgctggattctcctgcccatctggaaattgaaggggaagattttccttttgtgtttcattcaatgcctgaatttggagctgctataaacaaaggaaagttgcgtggcaaagtggatccagtgttaattgtaggttctgggcttactgccgctgacgcagtactgtgtgcttacaacagtaatatccctgtgattcatgtgtttcgcagacgagtaactgatccaagcttaattttcaaacagcttcccaaaaagctgtatcctgaatatcataaagtctatcatatgatgtgtactcagtcatattctgtagactcaaatcttttatctgattataccagctttcccgagcaccgtgtgctttcctttaagtcggacatgaaatgtgttctccaaagcgtttctggattgaagaaaatatttaagctgtctgcagcagtagtattgataggttctcatcctaatctgtcttttctgaaggatcaagggtgttacctaggccataagtcaagccagccaatcacatgtaagggtaatcctgtggaaatagatacatatacctatgagtgtattaaagaagccaacctttttgcattgggtcctttggttggagacaattttgttcgatttttaaagggaggggcgctgggtgttacacgctgtttagctacaagacagaagaaaaagcatttgtttgttgaaagaggaggaggagatgggatagcttaaagcaagtttacaagtaattaaaatggacagtttgccattaaagatttttaatagtggttttgcagtgtactggcttgaattttctggacttgagttaactgaaggagagcctcaaactatagtaacttcatttttaaaagttactagaatttggtatcctgatttatattgcagtgtttcaaaggtgtcactgtcagacaaatagaaacactgccaacttggtgtaacttaagctttcatttaactaaaacattcttttcttgcaaaacttatttttcatgatcatttttggttatttattatacttgattccaaaatagtacagccttgaatctataaaactgtgcagtcattatgccagaaattatcttaaatatataatgggtcaccttgctgttcaaagggtggtgcaaggtcctgcagcatcttacatctgtagcttgttagaaatgtaaactctcaggccccacaacttacttcctgcattttaacaagatccccaagggatatgtatgctcataaaaatttgagacactggtttaaatgaaaatggatataaggtatgtataactgggggtggggtgagggtaggaggcatttacaactcagattttatttattttgaaattatcaattgtataaatctaatttattaccaaatagggtcttttaaaaaatatttttatcgttgaaaccttgacaggtacttcatattcttctaataatttaaacagtccaataatgtggtatacactttgacatccaagaactcaccaagatgtttttcagagatttattctcgatttaactatcatagcatttaatgaatctgatttgtagttcaataaattgtgggttgaactacttatccctgtgtgaacattgaattactttctgtcactgaaactgaggtatttgggtgtggtaagtacttcgaaaattgtaatactgtttgggcattgtctaaattattaaaggttaaaatagaaaataaagtcagaatttttcttttccattccaaaggtgtacttagagatctctattagtattcattcgagatgacatagcagctcatatcatggttgtttattggatttatctgttctaattatataagtgtgtttactgtctgtgttttcacacaaactgctagaatttttaatgttaagacgaaaacatctgaagttctccatggcaaattgaatttttcagtcattttcttttctttttttggtacaattacttcatctggaatgtcttcattgaactcgttattctatttttcttagaattaaaagtggattaatgtgggtttttctgttcattttattgcagtattaaatgcttaagcttattaggaccataattcactttaaatataattgtatagaatatatttgcgtcgatcaaataattgcttcagatgaattcttagactcttgataatatcacacctaatttaacttgattttacaagctgtacaatccagttttagttttctattgtgataataacttttttcaaaccagtttcacatcttaatgaaataacattctctgactgcacttgcttcagtactctcttgcctgcctgtttttgacctctgcatgagttggattagatgtttttcttactgtcacttctaaatagaaaatgacagtgttataaaaaagggaaggataaaacctttgacatccccttgtgtctcaaaagtccacagttattcaaacaatggctttttttgtgatgagagtatttgttaaaaaaaaaaaaagacttcaagaaaaataaaagttcagtggagctgcaaataaatctggtgaataatttcatctttggtaatctcccatttcctgagttcttcctcaatccaagctgtcctgtgtagtatataacatttgggcattttctctgatatactatactctcatgttctataaatttctgtcccgtaattctaacactttacattttttctttgctatcagctatagctattcatggaagggaagaatcactaaatacttgtctagttatagcatgatgtgagcatctcctccttatccctcgatgcctggcttggtgtctggcaaacagtccataattagcagatgttgaaagaccgtttacaaagcagaatttggggatttaaagtgcaatgatacaacaaaaagatttaattacagcttccagtgttttgactatgtgaaccatatccaactacttttttgaaaatctagttctatgtaatatatttctgtggcatcaaattttagttgattgtattagtcaataggaagtggtggaaaatttctaaataaattcaactattaaa

SEQ ID NO: 278 - DNA, 1408 bp, Homo Sapiens
cgggaacgccgctcttcgcctctcagcggcggcttgtcctttgttccggacgcccgctcctcagccctgcgtcctggggtcgctgctgcatcccgcacgcctccaccggctgcagacccatggccgagcgcggggaactcgacttgaccggcgccaaacagaacacaggagtgtggctagtcaaggttcctaaatatttgtcacagcaatgggctaaagcctctggaagaggtgaagttgggaaactgcggattgccaagactcaaggaaggactgaggtgtcatttactttgaatgaggatcttgcaaatattcatgatattggtggaaaaccagcttcagtcagtgctcctagagaacatccatttgtcttgcaaagtgttggaggacagacattaacagtatttactgagagctcatcagataagctgtcattggaaggaatagtggtacaaagagctgaatgccgaccagctgccagtgaaaactacatgcgattaaaaagattgcaaatagaagagtcttccaaaccagtgaggctatcacaacagctggacaaagttgtaacaaccaattacaaacctgttgctaatcatcaatacaatatcgaatatgaaaggaaaaagaaagaagacggaaagcgagctcgagctgataaacaacatgttttagacatgctattttcagcctttgagaaacatcaatactataatcttaaggacttggtggacatcacaaaacaacctgtggtgtacctgaaggaaatcttaaaagaaattggtgttcagaatgtaaaagggatccacaaaaacacatgggagctgaagccagagtacagacactatcaaggagaagaaaagagtgactaagaagactcctagccagcatgctagtgaaaggctagcagcgatgctatgcaaaaggcgctgatactggaaggcttgaacaccgtatgtttaataggggttaagtgacagtactttgatttctctcggtaaattttttaaacctgtaaggcttgtaaagtttcttaactgtttttttgaggagaaagaacagatttatttatagacttaacttgtattaaaccagattattcacagtaggaataggggttggaggattaagagggtttttcttaaatattagcttttaatgtgtacaattaggaaatttttttaagtgaggactctctacccttgccgtatctaaggagctgaggtaatacagatccaaggagaattgtatagcaagaaaaaaacagtcaactacagaaactcttaaaaggaataaaaacccaaagttccttattttgaaattgtcaaagaacaaacggtgtttttcttttaaacaggtgatcacgtttcttttcatactcaacgttaataaaaggagagagtttgtagtg

SEQ ID NO: 279 - DNA, 1890 bp, Homo Sapiens
ggcacccagggtccggcctgcgccttcccgccaggcctggacactggttcaacacctgtgacttcatgtgtgcgcgccggccacacctgcagtcacacctgtagccccctctgccaagagatccataccgaggcagcgtcggtggctacaagccctcagtccacacctgtggacacctgtgacacctggccacacgacctgtggccgcggcctggcgtctgctgcgacaggagcccttacctcccctgttataacacctgaccgccacctaactgcccctgcagaaggagcaatggccttggctcctgagagggcagccccacgcgtgctgttcggagagtggctccttggagagatcagcagcggctgctatgaggggctgcagtggctggacgaggcccgcacctgtttccgcgtgccctggaagcacttcgcgcgcaaggacctgagcgaggccgacgcgcgcatcttcaaggcctgggctgtggcccgcggcaggtggccgcctagcagcaggggaggtggcccgccccccgaggctgagactgcggagcgcgccggctggaaaaccaacttccgctgcgcactgcgcagcacgcgtcgcttcgtgatgctgcgggataactcgggggacccggccgacccgcacaaggtgtacgcgctcagccgggagctgtgctggcgagaaggcccaggcacggaccagactgaggcagaggcccccgcagctgtcccaccaccacagggtgggcccccagggccattcttggcacacacacatgctggactccaagccccaggccccctccctgccccagctggtgacaagggggacctcctgctccaggcagtgcaacagagctgcctggcagaccatctgctgacagcgtcatggggggcagatccagtcccaaccaaggctcctggagagggacaagaagggcttcccctgactggggcctgtgctggaggcccagggctccctgctggggagctgtacgggtgggcagtagagacgacccccagccccgggccccagcccgcggcactaacgacaggcgaggccgcggccccagagtccccgcaccaggcagagccgtacctgtcaccctccccaagcgcctgcaccgcggtgcaagagcccagcccaggggcgctggacgtgaccatcatgtacaagggccgcacggtgctgcagaaggtggtgggacacccgagctgcacgttcctatacggccccccagacccagctgtccgggccacagacccccagcaggtagcattccccagccctgccgagctcccggaccagaagcagctgcgctacacggaggaactgctgcggcacgtggcccctgggttgcacctggagcttcgggggccacagctgtgggcccggcgcatgggcaagtgcaaggtgtactgggaggtgggcggacccccaggctccgccagcccctccaccccagcctgcctgctgcctcggaactgtgacacccccatcttcgacttcagagtcttcttccaagagctggtggaattccgggcacggcagcgccgtggctccccacgctataccatctacctgggcttcgggcaggacctgtcagctgggaggcccaaggagaagagcctggtcctggtgaagctggaaccctggctgtgccgagtgcacctagagggcacgcagcgtgagggtgtgtcttccctggatagcagcagcctcagcctctgcctgtccagcgccaacagcctctatgacgacatcgagtgcttccttatggagctggagcagcccgcctagaacccagtctaatgagaactccagaaagctggagcagcccacctagagctggccgcggccgcccagtctaataaaaagaactccag

SEQ ID NO: 280 - DNA, 1454 bp, Homo Sapiens
gggggccggagcgggaggcgtggggagaggtcgtgggcgggaccgcgaagggcggggagcggggcgggccggctcggattccggaaggctgagactccagtgacccggcgggaggagaggcaactttccctgtcgggcttgagttgggagaggagcagggcggccttgtagggacccgtccctgctcctgaccatcaccgtcactggggtcactgtgctcgtgttggtcctgaagagcatgaactccaggaggagagagccaatcaccttacaggaccctgaagccaagtacccgctgcccttgattgagaaagagaaaatcagccacaacacccggaggttccgctttggactgccttcgccggaccatgtcttagggcttcctgtaggtaactatgtccagctcttggcaaaaatcgataatgaattggtggtcagggcttacacccctgtctccagtgatgatgacagaggctttgtggacctaattataaagatctacttcaaaaatgtacacccccaatatcctgaaggtgggaagatgactcagtatttggagaacatgaaaatcggggagaccatcttttttcgagggccaaggggacgcttgttttaccatgggccagggaatcttggaatcagaccagaccagacgagtgagcctaaaaaaacactggccgatcacctgggaatgattgctgggggcacaggcatcacacccatgttgcagctcattcgccacatcaccaaggaccccagtgacaggaccaggatgtccctcatctttgccaaccagacagaggaggatatcttggtcagaaaagagcttgaagaaattgccaggactcacccagaccagttcaacctgtggtacaccctggacaggcctcccattggtccctggtcggcagagggcgctaccctactgagcaattctgcgcagttccactaacaccaggccacaccctgccggacaactccagctggctgtactgattcacacacctcggctggaagtacagctcaggcttcgttactgccgacatgatcaaggagcaccttcctcctccagcgaagtccacgctcatcctggtgtgtggcccgccaccactaatccagacggcggctcaccctaacctggagaagctgggttatacccaggacatgattttcacctactaacacctccacgtgctcagcaattttgcatgtcccttttcatctgtttcagagtaagttcaatttcaccacggtaaactgggatgttttcaaaagtgccttgccatgtaccttcgcgcacacactggttctcctcttttgggtgtgggcctaacaaaaagggctcaaggggctggagactggctgctggggcctccttgcttggaggctggaaagagctccatttcagtatctttctccgtggttttgtgaaataaactcaagtacaaagcaga

SEQ ID NO: 281 - DNA, 1846 bp, Homo Sapiens
tggagcgccgttcgccggtatgtgcgcatgcgttgaggtctcttgacgccgattggggggtcacgagtcacgggcggcgtgcggcggctggtgggggcgtgtccggcggagcgggcgcggcgttacgaggccgctggttggccagcgctagtcacgtggttcctggccgcaagcgacgcgcgccggtgcgacgtcaacgcagccgggcgagttttaccgatctgtgttccgcggcccggccgcggctgagtcttcccagggtcagggtcaggcgctttgctgagtccctttgtggccgccatggacaattccgggaaggaagcggaggcgatggcgctgttggccgaggcggagcgcaaagtgaagaactcgcagtccttcttctctggcctctttggaggctcatccaaaatagaggaagcatgcgaaatctacgccagagcagcaaacatgttcaaaatggccaaaaactggagtgctgctggaaacgcgttctgccaggctgcacagctgcacctgcagctccagagcaagcacgacgcagccacctgctttgtggacgctggcaacgcattcaagaaagccgacccccaagaggccattaactgtttgatgcgagcaatcgagatctacacagacatgggccgattcacgattgcggccaagcaccacatctccattgctgagatctatgagacagagttggtggacatcgagaaggccattgcccactacgagcagtctgcagactactacaaaggcgaggagtccaacagctcagccaacaagtgtctgctgaaggtggctggttacgctgcgctgctggagcagtatcagaaggccattgacatctacgaacaggtggggaccaatgccatggacagccccctcctcaagtacagcgccaaagactacttcttcaaggcggccctctgccacttctgcatcgacatgctcaacgccaagctggctgtccaaaagtatgaggagctgttcccagctttctctgattcccgggaatgcaagttgatgaaaaaattgctagaggcccacgaggagcagaatgtggacagctacaccgagtcggtgaaggaatacgactccatctcccggctggaccagtggctcaccaccatgctgctgcgcatcaagaagaccatccagggcgatgaggaggacctgcgctaagccccacccagccccccagtgcccgtcttcctgtcccatctgctcagagagaggtggggccgagacttgctggagagcttccctcctttcccatctggggagtgccgcgggccacagtgggcaggtggcaccgggggtcagcatgcaggggcgccagaggcccaggctgctggccggacagtcaccctctgttctcgctacatcccttgccccctgtccatttatttaagcccccataggtgcccttcacccccaaaaccagctgtacagaatctttgatacagacctatttgctaggggtgctgccggggatttggggtcagcatctggccccctatctcctgaccagctgagtcatgaggccggtttctctctctctcccacttttgtcccccagccaagctctaaagcacatgtagccgctgagacctgctgtttctgctgggggcaggctcctcttcccccagccccgggagcctcccccagcttcctgcagccccgacctctcaggttagaccctgggccctggagcttaggggattctccccaccccagccccacacctgctccttccctaatgctttgaggttttcttggttggaagctgcagctggcccaagaaagaaaataaaaaacaacacttttgcatgagtcaaaa

SEQ ID NO: 282 - DNA, 2129 bp, Homo Sapiens
tttccgcattgaaggggctgctccgaatggagggggaggggaggtgtttaggagaaagtaggggctgtgggtgtcgggagccggctgacgggtggacaagggggggttagcagctgggctgcgaccgttagggaggggctcaaggtgtgcatgtgtgagggaagagagagagagagaagggcgcctcagaggtgactttcagcctgcgagccttcttcccggggcgccataaacgcccccaatttcccagctgctaaaggaagaggaagatcttagcaaagcaatgtctcaagatggtgcttctcagttccaagaagtcattcggcaagagctagaattatctgtgaagaaggaactagaaaaaatactcaccacagcatcatcacatgaatttgagcacaccaaaaaagacctggatggatttcggaagctatttcatagatttttgcaagaaaaggggccttctgtggattggggaaaaatccagagaccccctgaagattcgattcaaccctatgaaaagataaaggccaggggcttgcctgataatatatcttccgtgttgaacaaactagtggtggtgaaactcaatggtggtttgggaaccagcatgggctgcaaaggccctaaaagtctgattggtgtgaggaatgagaatacctttctggatctgactgttcagcaaattgaacatttgaataaaacctacaatacagatgttcctcttgttttaatgaactcttttaacacggatgaagataccaaaaaaatactacagaagtacaatcattgtcgtgtgaaaatctacactttcaatcaaagcaggtacccgaggattaataaagaatctttacttcctgtagcaaaggacgtgtcttactcaggggaaaatacagaagcttggtaccctccaggtcatggtgatatttacgccagtttctacaactctggattgcttgatacctttataggagaaggcaaagagtatatttttgtgtctaacatagataatctgggtgccacagtggatctgtatattcttaatcatctaatgaacccacccaatggaaaacgctgtgaatttgtcatggaagtcacaaataaaacacgtgcagatgtaaagggcgggacactcactcaatatgaaggcaaactgagactggtggaaattgctcaagtgccaaaagcacatgtagacgagttcaagtctgtatcaaagttcaaaatatttaatacaaacaacctatggatttctcttgcagcagttaaaagactgcaggagcaaaatgccattgacatggaaatcattgtgaatgcaaagactttggatggaggcctgaatgtcattcaattagaaactgcagtaggggctgccatcaaaagttttgagaattctctaggtattaatgtgccaaggagccgttttctgcctgtcaaaaccacatcagatctcttgctggtgatgtcaaacctctatagtcttaatgcaggatctctgacaatgagtgaaaagcgggaatttcctacagtgcccttggttaaattaggcagttcttttacgaaggttcaagattatctaagaagatttgaaagtataccagatatgcttgaattggatcacctcacagtttcaggagatgtgacatttggaaaaaatgtttcattaaagggaacggttatcatcattgcaaatcatggtgacagaattgatatcccacctggagcagtattagagaacaagattgtgtctggaaaccttcgcatcttggaccactgaaatgaaaaatactgtggacacttaaataatgggctagtttcttacaatgaaatgttctctaggattctaaaataggcaggtactttactatgttactgtaccctgcagtgttgatttttaaaatagagttttctgcagtatgcttttagtctaagaaaagcacagatggagcaatactttccttctttgaagagaatcccaaaagttagttcatcttaaagtgcaatattgtttaatcttaaaactgggcaactttggaagaacttttaacagaagcctcaatgatgatcactttgaattgcttgtgatttcaaaaataaagcagtgaagcaataaaaaaaaaaaaaaaaaa

SEQ ID NO: 283 - DNA, 6034 bp, Homo Sapiens
ccacgcgtccggagctggaggaggcggcgggcgcgagacccggaatgcgcagggcccccgcctcgccccccccagcccgggccgcggcccccgccttccccgcagtcgtcccgcactcggtgcccgccccccgaggccggcggctgctcccactcggggccgttgctgcttgtgccgtgagcgccgcccagccattgtccccgtcgctccgtcagccgcgccggaccgcgcaccaggaggcgagagcgcgcatggggagcctctgttgatgccgccgccgcgccgccctccgaggctgcgtcccgggaagcccggctccccgagcgctccggcctggcccggtgccccggacctgagtgcgtccccatggaggcgcccgggctggcccaggcggccgcggcggagagcgactcccgcaaggtggcggaggagacccccgacggggcgcccgcgctctgccccagccctgaggcgctgtcgccggagccgcctgtgtacagcctgcaggactttgacacgctggccaccgtgggcactgggacgttcgggcgggtgcacctggtgaaggagaagacagccaagcatttcttcgccctcaaggtgatgagcattcctgacgtcatccgcctaaagcaggagcaacacgtacacaatgagaagtctgtcctgaaggaagtcagccacccgttcctcatcaggctgttctggacgtggcatgacgagcgcttcctctacatgctcatggagtacgtgccgggcggcgagctcttcagctacctgcgcaaccgggggcgcttctccagcaccacggggctcttctactctgcagagatcatctgtgccatcgagtacctgcactccaaagagatcgtctacagggacttgaagccagagaacatcctgctggatagggatggccacattaagctcacggactttgggttcgccaagaagctggtagacaggacttggaccctctgtggaacacccgagtacctagcccccgaagtcattcagagcaagggccacggaagggccgtggactggtgggccctcggcatcctgatattcgagatgctttcggggtttcctccgttttttgatgacaacccgtttggcatttatcagaaaattcttgcaggcaaaatagatttccccagacatttggatttccatgtaaaagacctcattaagaaactgctcgtggttgacagaacaaggcgattaggaaacatgaagaacggggcgaatgatgtgaagcatcatcggtggttccgctccgtggactgggaagctgttccgcagagaaaactgaagcctcccatcgtgcccaagatagctggtgacggcgacacttccaacttcgaaacttaccctgagaatgactgggacacagccgcgcccgtgccgcagaaggatttagaaatcttcaagaatttctgaggacaggagctcacatctggaagaaacaggaagattggaatctgcctggaacaaagaactgcacctaagcagaccagaagcaaaatgtcttcttcacggcataaggacatctccacttttctctgtacctgtgtgtatagaaatagattagagcacagttgaaattcatggaactggcattatttaagcaactggaattccacactgtaggaaggttttgaaaattgtttggttgtagattttatcttatcctttagtgttgtgttcctactgtgatgtcttggtttttgtcatagacttaagtttataagtttgaactggacttgttcgattataaccacaaattgtgtgtgtgtgtgtgtgtgtgtgtgtgtgtgtgtgtatgcctgtgtgtatatatagaagtcattatggcagatgcacagaaattgtgcagtgatgtaaatgttcatactttacagagcctataatttttatttttcaatttgttttttcaaaaatctcttctcggggacaacatctgaagggtatgttgcatgcattaaaaaaaatcatctcacatgcattttatagttttggggaagaaaatatcatggggaggtctaccttcagtatctttagttcttcttaccgggtaacttgagactttaaaagaagaaacaaagaggggaagatatgggagcgaatttattccaagaatctacaatgacattgaagttgttggaggaatgtactgtatttaaaaaaaccttctgtgacacattcaaaaatttcatctgagctggatgcagtggcttgttcctatagtcccagcactttgggaggctgaggtgggtggattgcttgagcccaggagttggagaccagtctgggaaacgtggtgagacctcatctctacaaaatacaaaaaaattagccgggcatggtggcacgtgagttaggtctcagctactcaggaggctgagatgagaggatcacttgagcctggggaggtccaggccgcagtgatccgagatcacaccactgcattccagcctgggtgacagagtgagaccctgtccaaaaaaaaaaaaaaaaaaaagaaggcaatggctttgtgcttttgaagatggattgaagagaacgtccaccttaaggctttaaaagacagtgaagctgggtgcggtggtgcactcctgtaaccctgggactttgggaagctgaggcaggaagattgagcctaggagttcgagactgacctgggcagcatagcgagaccccatctctatataaaaaaaaagatgttaaaacagtgaaattacagaaacagaacatagccaccctttttcatcagtgaccttttcttcacgtggaggtcaactcagtaggtgagaataattagtaggttcagcagaataaactctttacaattaataactcagtggaaaatgatgttcagatggtgaaatgtggaaatgttttagacaactctattttcagcctgtgcttctcactcaccatcctgttgggattaacagttgagggccatcgctgcctaaacatttagcgtgcggtttcccatcagttttaccgtgaatgtgaaaaggtgaaactggtgctgacttcggcagcaggtatactaaaattggaatgacacagaggagattagcatggccccctgcgcgaggaagatctgcagattcatgcagcattccatatttttttaagaaaaggttacactgtgcaccgacatgtggagctagaaggaaaagcttttaagtctcatgtttgctgactataaaaataaatcatagtaataatattgaacattctactttaaaaattattaataaaaccataaatgaaacacttgagcacactttaaaaagtacataaatccatgagtccatatgcctatttttaggttgtctgttttattatccaggatttcatactcagatgagaattagcatcaggaaagcctgaaatgccttaattgtgaactgatatgcaggaaaatgaaatatgcaagcacattggtgaccttgttctttacagacgtcgtgatcagcctccagccatacagaacaaatgagaaattagaagcgattccaagaacgtgtgatggtgtgaacccactttggaccatcacacacatttcagcatttgaagtgacacaagctacctggtaactgcccatggcggggtcatagtttaaatggcccaatgtcatgtagaggttaatttaatcaaaatgagctataaacatggagcaatcactgtataattttaaaatagtttacctggccaggcatggtcgtcacgcctgtaatcccagcactttgggaggccgaggcaggtggatcacctgaggtcaggagttcgagaccagcctggccaacatggcaaaacccccgtctctactaaaatacaaaaattaggtgtggtggcgggcacctgtaatcctggctactcgggaggctgaggcaggagaatcgcttgaacccgggaggcagaggctgcagtgagccgagatcgtgccactgcactccagcctgggccacagagcaagactccgtctcaaaacataaaaataaaaaaaatacaaatagctgacccgggtgggcattccaaaatgtccgcatggacgatcacgaaacaatcacggtgcgaaatgtccgcatggatgatcacgaaacaatcacggtgcggaatgtccgtatggatgatcatgacaaacaatcactgcgcaaaatgtggaggaaaattcattaccataatcacaacatttgtatcagaaaaacattacaaatttactttgcttcatgtaattttacgagttggcaatattttcttaaattggaatactctaagagaataggacatggatatgttacaagaagaagtgtattggggcaagtcttgtttttctgaagggaaatgccaccggcctgctttcataggcattgataaagccaggaaggaaataaagtcacaaccaaatagtatacactgtctctactgaattcttctaattccttcgcaacagaagtctaaatcctgcttagcctaaacatatctatagccagcgatgggcaaattatatttgctgtcagcatgatagaataagaagcagaaaccccccagcagtggggtaagattgcgcgcttcatcccctcaaaatgcagctcagccccactccctctccatgcccatcaaacaactgcacaatcacttgttactgaatttcccattcagcgttttgtttctttctgtccatacttaaagaccaaatcatttgtttgctttgaagaaaaagcaaaaacaagaacaaaaacaccaaatcatttgaaatcactgtccattaaaaaaaatcaccagtggaactaaacagttgagtggtttgggatgtgttcgccatttctgtgtttgacctacatggcctgtaattctttggaccattgtaactgtgaactatggcttaatactgttaaagaccccaaggctccactctgtagccaggtgcacctcaggctgcacaaataccccaccagaatgtcacaatcattcattgctccagctactgagtgaacagggtgcaagacagcactggcttgggttgtatttttgcagccagttaactttgcatcaggtctacacagtccttgcagcctttgatttctccagttgtagagatttgaaatggggtgcccgggttgctctcgtttttccttcaagctacctagcatgcattttacacacattggaggagtcgtatgcactgtttttctgttgctgatggaggcaagcaggccttctaattagtctaagttaaacggatgggattcacttaagaaaagcaagaagaaaagcacacgaacaggtgtcttaatgcatttggatagtttctttgcggggtgtgtgtgtgtgtgtgtgtgtgtgtgtgtgtgtgtgtgtcttggtgaaggtgaggggctgtattttcaccaagccttttcataatcaagtttgctttgcaaaccttatggccttgcaccccgcagaacagtcccttcctaatagcagggatgctctgtcatggtttttctgtaaattatcgtgtgttgggaagttctgttgaggcttagtttgatcttccatggtggacacgtctgttctgtatgtaaaaggcattacaattgtgttttagcagatgagacttgaagcctttccacagtccttgtgctctgagatggctgttgagctctgctcaactgtcgtagctgaattctttctttgcgctgaacactgggcagcctcaccatgttgccaacgtgcttctggggcccctgtcactgccgctggatgccgcgcacacaggcagagtgccttggcaggtttgtgcaccccttggcgagccagaactgggaaccccgcggggtgaccccttctcatggggggtcggggaggggagtgcctatttttaatcctgtctgtttgttgcacaatggaaatcactgtgatttgtacatatgccctaggaaaattttactgctgtctaatttatgtaataatactgttgattccaggtttatttaataaaactttgtatcttttcagaaaaaaaaaaaaa

SEQ ID NO: 284 - DNA, 3121 bp, Homo Sapiens
gccagagggaaacaaacgccggcgctgacaggggccgccagcccctccgccgcgcggagcccacgaaggggacagcgcagccggcccagagctcgggtctccggggaccgagccttatgatctcctcattgcgtccccctctgcccactggacttggacttcagatctgaccccagacctgccggctacctcgggagggcccacctccccgcccatccagcaagatgccaatcctcaagcaactggtgtccagctcggtgcactccaagcgccgttcccgagcggacctcacggccgagatgatcagcgccccgctgggcgacttccgccacaccatgcacgttggccgggccggagacgcctttggggacacctccttcctcaatagcaaggctggcgagcccgacggcgagtccttggacgaacagccctcttcttcatcttccaaacgcagtctcctgtccaggaagttccggggcagcaagcggtcacagtcggtgaccaggggggagcgggagcagcgtgacatgctgggctccctgcgggactcggccctgtttgtcaagaatgccatgtccctgccccagctcaatgagaaggaggccgcggagaagggcaccagtaagctgcccaagagcctgtcatccagccccgtgaagaaggccaatgacggggagggcggcgatgaggaggcgggcacggaggaggcagtgccccgtcggaatggggccgcgggtccacattcccctgaccccctcctcgatgagcaggcctttggggatctgacagatctgcctgtcgtgcccaaggccacgtacgggctgaagcatgcggagtccatcatgtccttccacatcgacctggggccctccatgctgggtgacgtcctcagcatcatggacaaggaggagtgggaccccgaggagggggagggtggttaccatggcgatgagggcgccgctggcaccatcacccaggctcccccgtacgccgtggcggcccctcccctggcaaggcaggaaggcaaggctggcccagacttgccctccctcccctcccatgctctggaggatgaggggtgggcagcagcggcccccagccccggctcagcccgcagcatgggcagccacaccacacgggacagcagctccctctccagctgcacctcaggcatcctggaggagcgcagccctgccttccgggggccggacagggcccgggctgctgtctcaagacagccagacaaggagttctccttcatggatgaggaggaggaggatgaaatccgtgtgtgaggcggacagtgggtggccaccgggagctcttggctgcatcttctccctgcccccaccccactatgacctttgaccctacggcgcaggggcagccaggacccttgattcagaccatggaccctggaccttgtagatgagggacactggcctggccctcgggtcttcggaggacgtagggggctggcatgggtgccgactggctgcctgacttcatcatgctccctgcacttaggctgcgtgggacaagggctgtgttgtcacagcaggaataggttttcctctgttggcctccctttcctccaccctggcctcaaatggatgccagatgccaaccccagttctggccacgtacagccagcgggtcagcccagaggcagcctcagctccagggctaaggactctcggctcccattttctctgctggcgtttctgctgtgcccagcagtggctgctggggaagcagctgcagcaggagggagacggtcttgcctctcagcccctccctgccccaccccagctcctgccctggaaatctggagccccttggagctgagctggacggggggccagctgcgagcatgtgcactaaacgcagccctttccaggggaagagaacaggatggagaatggaaggaaagccccccaggcttcgtgaattgcaagaagggacccttccaggatgacactaggaacagggctagggcactcgctcagtccctaggggcttgtttgttctttattattgtgtttaaatccttatagagcaatatcaggatggtgttaataggtctgcctcagaatgagaatcaatccttttagaaaacctttatactaagcctcctcttcaaaattcacagtggcgattagcggactggagtctggtggcgattagcggactggagtctggggacatccgtggcaaagacaccagctcaactttagtgcttcccaactttatttagaatgacatggggtgggtgtctggtgtgtgtgttttccctacgcacctcccatagctattaacaactgaggaaggccagtgcagaatatttttggagaacgattttttttttaaataatatatcattcctatggggggaaagccttttttttctttttggctgagttattccctccctcccctcaataccctcagtactgactacttccctttcttttctcaggcctccccccaccgacttttgaggccagggttggccagatttagcaaaaccaaaacagagtgctgagttaaacgcaaatttcaggtaaacaaaagataattttctagcattaatatgccccacgcaatatttggaacacttatgtgaaaaatgatttgtttttctgaaattcacgtttctctctgagtcctgtaactgtccccgaggggattgagcagaagctcgggtatgagccctgaggttgactgccggttatttttctgtcctgggaacagcctgacccacctccctgtctccatgtagccagtgaggggagggggagacacagaaccaaccacagccaggggcgtccccatggcgactgtggcccggcccctcctctcttgcctgactctcctctcttgcctgactctagacactaacttagttccaggttcggtgccctgttggtgctcctgtttccaatagcttaggtcccatggtgggggaggaacctcaggggctatgcagcccccgccagctgccctcgaatcccgtccaggccaattccagattctaaactgatttttttcatgatattgtcaaaacagtgaggaaacattaaaaaaaaagccctaaagcaaaaaaaaaaaaaaaaaaaaa

SEQ ID NO: 285 - DNA, 5174 bp, Homo Sapiens
gagtgcgctttagctgctgcgccacgcgcgcctcgggcctgggcgcagaggatcggccgggcgcggcgggaaggaggctgcgggcagcgaggagcggctggcgctcgaggcggcggacggcaccatgtccccggggagcggggtgaagagcgagtacatgaagcgctaccaggagccgcgctgggaggagtacgggccgtgctacggcgagctgctgcactaccgcctaggccgccggctgctggagcaggcgcacgcgccctggctctgggacgactggggcccggccggctcctcggaggactcggcgtcgtcagagtcgtcgggcgccgggggccccgcaccccggtgcgccccgccctcgcccccgccgcccgtagagccggcgacccaggaggaggcggaacggcgggcgcgcggggccccggaggagcaggacgcggaggccggggacgcggaggccgaggacgcggaggacgcggctctgccagcactgccagtgaaagatgtagaagataaacctgaacaacaaaccagaacaagagagactgacaaatcacccaccagtactgagcctcgacagcaaccaagtgccttatttgctagaggaaacaggaaagcggtcaaaagtccccaaagatcatcgagtaaaataaaagaaaacaagcatccatttgctctttatggctggggagaaaaacagaccgatacaggaagccagaagactcacaacgtctgtgcgtccgctcctgtgcatgagattcatgaatcagcattacgagccaagaacagaagacaggtggaaaaaaggaaactggttgctcaaaggcagcgagctcactctgtggatgtggagaagaacagaaagatgaaggcttcctcctcagagaacccgtggatgacagaatacatgaggtgctattcggcaagagcttaaagaaacacttgcgtggacagcctcttttaaaaagtgtaaatgactgaaaggaaaaacaaaacaaaaaccatcaaaagaaacggacacaggtttaagaaaccaactgattatgcaaggttttttttagggaatttgtaaaagattgttttattttgatgaatattggtcacctacctcggcagtagggcagacagttgaagccatagacatttggttatttatgaagataattccctaaatctttgatattcttataaggtttttgttttaaagcatcttaatcttttaagatactgacaccaaatgcctttaaatggcaacagatgcttacagttcagtattcttttcataagcttaggtagagcctattatcatcttgttctaaataactttccagattccatagctataagatcattccatcctacagcataagactcgttttccttatatgccgttttgtttgtgaaagaatatcaagtcaaaaatgagtgtcagcactactactgattccatgtataatgaaagtagaactttgctagttcctgaaaatttttaacttatttgtatttcagttcagcagcatctttatgtagattgtgatatttaagaattatctgggctgggcgagggtctctttttctctttcagtgatcatctaggcagttattatttaatagtttaatagctcaagtacattccaatagacgaagtgcacacaacacaatatgtgtgtacagtagtagtaaagtttcttttgagtagtcaaagactcactttttttattgcctttttttttttttttaaagaatacatactgtggattcagtcccttgtcacacttgaccttttggcatacacccactgtggacttttgcctcttctgtaatggctggcaatgacatttcaaacttacaatctggaattgcacttggtacattggcattgcttgttccactgggatggggaccagtgtgaagatgcctgttagatagactgcccacccctactttctctttttctttatagcacttaacaataacaaagtcttgatgatgtacagtattcaaactttaggttgaaatacgttactctttgattcctagccagtagatcttatctacactttaatgggagagaatggtggtgtgtgagtaggcacaaatttatgtaaatagtgctccttctctttagtatgtttgctttgggggtagaaaaatggttttaacaaacactggtttccatcaaatgaatgatgtcttctccatcctgtggagacaagaatctgctagaaggatatgtgctaagttccttataagagataatggtgctctgcctatgccagcttggcacccgaagatgtgtgagtggacgtgaggctgagtattaccttagtatttttctctgggtctttgggaaaccatagtcaatttttagaacatattgctttcattccccataaactcttcacacatgataactgtttaagctttgaaaacacatactgaagtattgtgagcttaaaaaaactttttaaatatttgcatagttttgaggtgaatttgtttccttacagatctctcctaatcattgagatgtatatttcaaaagaggaaattttacatgttgtccaaaacagccttgctagtaactggtgaattttggtattaactattattaaagtctttaaacgacacaggtacctaaagatcaccttaatgtggcaatttgtgatggtgtagctagctgattgtgaaaactgttcctttaaagtcgcttcttgcatgttcggtgttagtcatccagctcaggcttgtgttgcagctgacaatctaggaaagacggccttagagagtggtgcaggccccacactgacggactgccttagaaacccgacttcctctagactttgaaccgccagacttttctcttgtttagaaaacaaacttatatttaatgtacttactacttaaaactccagacagagatataatgtagaaggcaaatattggccaattttttcctctttttaagtggaagacaaatgaacgggatttttaaagtgcttttaaagtgcatgaatggttaataaatcagtatgaattgtaagccttcatcttacatccaagtccttagttggttagggtttcttttctttcttttttaaagagtgtcaattaccttttgaacctgtgaaaatttgatagttgttaacagtctgatggtcctaattctttcttttcattctagaaatgaatgtggttgtaatcatgttcctaattcttgggacaacctgcaagacagtgagacagtttaaaaattacctttcatgttgaaaaagtctgaaacagagaacccaatgatatttaaaataaatgctacataaaactctttttaaaattttgattttaacttaattaaaacaatgtcataaatatgctttttgattttgttactgcttttaatattaaagtaatagaatattgaagcaatattgtctagcactctgctggacattaagtccgcgggaggagaagtgaacaggaatcgattctttgtcttttaactgcccttagttaggagatgttaaaatacttggcacctctggttatatgtatgttatgtgtgttctcccccctaaaatttctaagcacatttattcacttttaaaatgaatctttaaaagattatagttagtagttatagttaatattctatttacttggaaaaatgtgaataaatggatcttcaaaagattcattttaaaaatgaataaatgtataataggctataggtgatcttacttgcgtattaggtaggaggcacatatttataccatttcatatgtaatatctttgtcattgtgtttcatcgaagatcaattgctagcaacttgaagggtatttatacttgggtcacttgaactcagctgactaaattgtaagaacgagagcaagcaagatggctgttattggaagccataacttccagaagataattctgcacaattcgtaagttaaaaaaaatctgtagggtcttccactatcctttttcaggttgataatgctgttctgggcacacactttgtaaatggaatgttatggtacagtcgcctctcagtatccatggggcattggttccaggcctcccttaggatgccaaactccatggatactcaaaccccttctataaaatggtgtagtatttgcatatatcctagacacatcctcctgtatgctttaaatcatctctagattacttaaaatacctaatacaatgtaaatgctctgtaaatagttgttatactatattgtttagggaataatgacaaggaaaaaaaagcctgtacatgttcagcacaagtgaaaccatcctttttgcccccaaatattttcaatttgtatttggttgaatccatggatgcagaactcacggatacagagggccgactgtactttctttaaagtgttcaaaagtattactagcaaagaggaggaggagcaaagcatatatcagaagtaaaacaatttttcttgttgactgctttggtaaaaaacagtttgatggatagttttacatttcactggactagataaaaaatggtgctaatatttatgtagcttgatgctatagttgctttggtatcaaacttaatacctaacccatataagatccttattatataattttgtgatcagtaaaatgatattttaaagagtgatcttaaaaatatgacctggtcattgcacaacgtttgcatttgaaatgaatttttgtactatagggtggatatggagttattcagtgcaagtgtgtgcttaatatcaaaccctatgcaaggagctatgtctagatttttggtccaaatttgcctccttcaagcctactagtgtgagatggaaaaaaatcgattgctcttttaatattatttccattttgaaattctcgacacttgaatgaaggcagtagaggcctctttttggatttctcttctaataacaaaactttatttagggaaggtttccctgtgctatcgtaagtttgttttgagcactgcattcactttaaaattctggaggaacaaaggctgggcacataatcacaaagcccaggccacacaataattcggggttgtattttctaagaactatgtattgtttttagcttatagttaatattgtatttacttggaaaaatgtgaataaagttaattaacattacaaaaaaaaaaaaaaaa

SEQ ID NO: 286 - DNA, 2319 bp, Homo Sapiens
accatgggtgaattatgaatcagtagctatgccaggcctcagctgggccacatctggagaactggggtgagggcacaacatcacaaaatatctggccccagtctggtcactcatcccttttagggcaacaaggaaactatcctgtggcctgagagcacaatacctgagacaaaggccagcagaaacatttgtctgccctcaccctttctgccccagcttccacctgctccccatctgcccacccactaaagcccatgtggcatgccatctctcgaacatccaggatgtcccagagtggatgtccatcaggtctgctggcagacaaaaatatctcttcaagtgccactcgagtgatagtgaagactgcaggcaaccagaaagactttatggtagctgatgacatctcggtaaggcagttcaaggagatgctattggctcacttccaatgccagatggaccaactagtgctggtcttcatgggttgccttctcaaagaccatgacacactgagccagaggggcatcatggatggccacaccatctacttggtcatcaagtccaagcagggctccagatctctagcccattccttccgggacctgccaacgaatgatccctgccaccgggacagaaacaccaaaggaaacagcagcagagtgcaccaaccaactggtatgaatcaagctccagtggaactggcccactttgtggggtctgatgcacccaaagtgcatacccaaaacttggaagtgagccacccagagtgcaaagcacagatgctggagaatcctagcatccagcggcttctgtccaacatggagttcatgtggcagttcatttcagaacatctagacacgcaacaattgatgcagcagaacccagaagtttcccgccttcttcttgataattctgagatcctattgcagactctggagctggccaggaaccttgctatgatccaagagataatgcagatccaacaaccttcacaaaaccttgagtatccactgaacccacagccatatctgggcttagagacaatgccaggtgggaataatgccctgggtcagaactatgctgatatcaatgatcaaatgctgaacagcatgcaagatccttttggaggaaaccctttcacagctctcctggcaggacaagtgctagaacaagtccagtcttcacccccacctccaccaccatcacaggaacaacaagaccagctcacacagcatcctgcaacccgagtcatctataatagctctggtggtttctcttcaaacacctcagccaatgacacccttaacaaggtcaaccacacttccaaagccaacactgctatgatttccaccaagggccagagccatatctgtgccactcggcagccagctgggataccagccttacctagcatagagcttacccagcagcttcaagaagaatacaaggatgccactgtttctctaagtagctccagacagacattaaagggtgatctccagctgtcagatgagcagagcagctcccagatcacaggaggcatgatgcagttgcttatgaacaacccctacctggcagctcagattatgttgttcacaagtatgccccagctgagtgaacagtggaggcagcagctgcccacattcctgcagcagacacagatttctgatctgcttagtgcttaggcaaccctaaagcattccaagcaatattgcagattgagcaggccctccagctgctggccacagaggctcctgttcttctgccttgggttgcaccctacctatggggcctgggttggcttcctgcccccagctgcagctatcctgacacagtgccctgttcctggaatgtttcagatacagctgagcccaagggacctgagtgctgccacaagcctggaacagtcctgcagaggctacaatccccggatggggacccttcccaccctctgcaagctcctgagatttgttttagcaaacagatggattctctccaggccatgggatttgggaaccaccatgccaatctacaggcactcattgctactgaaggggacaccaatgctgctatccgcaagctcaagagatcccagagattctaaccaccatgcctacttgtttgcttgctacctgcctgctgacccacctgaccatctcatttgccttttgcacctttcctgatgcttccagccaggagaagtcctggaataagagttatcaaccaatgtgtcttgtactgaataatagatcattggtcgtggctgaaacatctgtcaataaaatggctacactcacttgctgcgaaaaaaaaaaaaaaaaa

SEQ ID NO: 287 - DNA, 1482 bp, Homo Sapiens
gcacgagccgccaccatggcttcacgtggggttgttggcattttcttcctctctgctgtcccccttgtgtgtctggagctccggcgtgggatcccggatataggaatcaaggattttcttttgctttgtggccggattttgctactgcttgctcttcttactttaattatttctgtgactacctcatggcttaactcatttaaatctccccaagtttatctgaaggaagaagaagaaaagaatgagaaaagacaaaaacttgtgagaaaaaaacaacaagaagcacaaggagagaaggccagcagatacatagagaatgttttaaaacctcaccaggaaatgaaattgagaaaactggaggagcgcttttatcaaatgacgggtgaagcctggaaattaagcagtggtcacaaacttgggggtgatgaaggtacaagtcagacatcttttgaaacatcaaacagagaagcagcaaagagccagaacttgcctaaacctttaactgaatttccgtctcctgctgaacagcccacatgcaaggagattcctgatttacctgaagaaccttctcaaacagcagaagaagtagttactgttgctctccgatgtcccagtgggaatgtcctgaggagaaggtttttgaagtcctacagctcacaggtcttatttgactggatgacgagaattgggtaccacatatctctatacagcctttctacttcctttcccagacggcctctggcagtggagggaggccagtcgctggaggacataggaataactgtggacactgtactcatcctggaggagaaggagcagaccaactaggaaagaagggagagctccctgtttgcatgaagtcagttatgctatgaccttctggcacaataaaggcttcactttcgaatcacaccataccttgattgagctcatggcagtaaactttgaacattgatatccatgggaataggattagaaaaggattgctttctatatataataatctgtggactgtgccattttacagtgtacccaaatgagaatgaggttgaaatgtatgcagtaaggtactcagtaattaattggtattttttcccagctgacatgatttcctcagtgttagaaaacaaacccttagaactttcctttctgcctcttcaatccatcttaccacacaatatttcatgattcaaattcttcaaagtcttatacgcaggaatgtttattctgctgtatttctgtgaaattaaaaacttggaagaagcttcaaagctcttggaggctttaaagttctttctgttgggtgtgcattacagtttacttaactgatgtttgcgatttatataattttgccttgtattaaatgttacaaagttccaaatgaatcagtattttaaaaaataaaactatgaaagcattaaaatataggtgaatttttaaaaaaaaaaaaaaaaaaaaaaaaaaaaaaccaaaggggggggg

SEQ ID NO: 288 - DNA, 1524 bp, Homo Sapiens
agcagacagaggactctcattaaggaaggtgtcctgtgccctgaccctacaagatgccaagagaagatgctcacttcatctatggttaccccaagaaggggcacggccactcttacaccacggctgaagaggccgctgggatcggcatcctgacagtgatcctgggagtcttactgctcatcggctgttggtattgtagaagacgaaatggatacagagccttgatggataaaagtcttcatgttggcactcaatgtgccttaacaagaagatgcccacaagaagggtttgatcatcgggacagcaaagtgtctcttcaagagaaaaactgtgaacctgtggttcccaatgctccacctgcttatgagaaactctctgcagaacagtcaccaccaccttattcaccttaagagccagcgagacacctgagacatgctgaaattatttctctcacacttttgcttgaatttaatacagacatctaatgttctcctttggaatggtgtaggaaaaatgcaagccatctctaataataagtcagtgttaaaattttagtaggtccgctagcagtactaatcatgtgaggaaatgatgagaaatattaaattgggaaaactccatcaataaatgttgcaatgcatgatactatctgtgccagaggtaatgttagtaaatccatggtgttattttctgagagacagaattcaagtgggtattctggggccatccaatttctctttacttgaaatttggctaataacaaactagtcaggttttcgaaccttgaccgacatgaactgtacacagaattgttccagtactatggagtgctcacaaaggatacttttacaggttaagacaaagggttgactggcctatttatctgatcaagaacatgtcagcaatgtctctttgtgctctaaaattctattatactacaataatatattgtaaagatcctatagctctttttttttgagatggagtttcgcttttgttgcccaggctggagtgcaatggcgcgatcttggctcaccataacctccgcctcccaggttcaagcaattctcctgccttagcctcctgagtagctgggattacaggcgtgcgccactatgcctgactaattttgtagttttagtagagacggggtttctccatgttggtcaggctggtctcaaactcctgacctcaggtgatctgcccgcctcagcctcccaaagtgctggaattacaggcgtgagccaccacgcctggctggatcctatatcttaggtaagacatataacgcagtctaattacatttcacttcaaggctcaatgctattctaactaatgacaagtattttctactaaaccagaaattggtagaaggatttaaataagtaaaagctactatgtactgccttagtgctgatgcctgtgtactgccttaaatgtacctatggcaatttagctctcttgggttcccaaatccctctcacaagaatgtgcagaagaaatcataaaggatcagagattctg

SEQ ID NO: 289 - DNA, 3726 bp, Homo Sapiens
cagtcagaccgctaacaggagaaatggaatattaagtatagtatattgttccccctcaccttttctcatttcttcctctgtctcaggcactcattcatatattcatttgcagatttattcaatgaacattttcttgggttaaagttatgtgccagcattataaaattgaatagcgcatgggccttgccttcatagattttatagtttagttttatatatgatgttccattctgaacatgagaatcaaaactttctctccttaggcttaaattctgtatctttaaaaaaaggtttagattccttcaaaaggaaacagttcctttctaggatgatttaaaattccaagcatatggaatgctttagcttcttttggaagagagttagaagcatgtgtaagaggtgtccctaaggaatcctctgttataccctctatcatcaaggagttaaataggccagaaatgtttatcaagagaattccagtgttgatagcggaattgattatggattaagtttaccacttggagaagactatgaacggaagaaacataaattaaaagaagaattgcggcaagattacagacgttatcttactcaggaaaggttgaaacttgaacgtaacaaagaatacaatcagtttctcaggggtaaggaagaatccagtgaaaagttcaggcaggtggaaaagagtactgagcccaagagtcagagaaataaaaaacctattggtcaagttaagcctgatctaacttcacaaatacagacatcttgtgaaaattcagagggtcctagaaaagatgtcttaactccttcagaggcatatgaagaacttctgaaccaaagacgactagaggaggacagataccgacaactagatgatgaaatcgaattaaggaatagaagaattattaaaaaagcaaatgaagaagtgggcatttccaacctaaaacatcaaaggtttgcaagcaaggctggcattccagatagaagatttcacagatttaatgaggatcgtgtttttgaaagacggtatcatagaccagaccaagatcctgaagtaagtgaagaaatggatgagaggtttagatatgaaagtgattttgatagaagactttcgagagtgtatacaaatgacaggatgcacaggaacaaacgagggaatatgcctcctatggaacatgatggggatgttatagaacagtcaaacataagaatttcatctgctgaaaataaaagtgctccagacaatgaaacatccaaatctgctaatcaagatacctgtagtccttttgcagggatgctctttggaggtgaagatcgagaacttattcagagaaggaaagagaaatacagactagaactgttggaacaaatggctgagcaacagaggaacaagagacgagaaaaagatttagaactcagggttgcagcgtctggagcacaagaccctgagaaatcgcctgatagactaaagcagtttagtgtggcaccaagacactttgaagagatgataccacctgaaagacccagaatagctttccagacacctctccctcctttatctgccccatctgtcccacccatcccatcagttcatcctgttccttctcaaaatgaagatttgcgcagtggactcagcagcgcccttggtgaaatggtgtctcccaggattgcacctctgcctccacctcccctactaccacctttggctactaactatcgaactccttatgatgatgcatactatttttatgggtccaggaatactttcgatcccagtcttgcttattatggttcaggaatgatgggcgtacagcctgcagcttatgttagtgctcctgtcacccaccaactagcacaacctgttgtgaatacggttggacagaatgaactgaagattacaagtgatcaagtgataaattcaggattgatttttgaagataaaccgaaaccttccaaacagtcacttcagtcttaccaagaggctttgcagcagcagattcgggaaagagaagaaagaaggaagaaagaacgtgaagaaaaagaagaatatgaagctaaattagaagctgaaatgagaacatataatccctggggaaaaggtggaggtggtgctcctctcagggatgcaaaaggaaatctgataagtcatatgcaaacacagagctctccttttgctcggggaaatgtatttggtgagcctccaactgaacttcagattaaacagcaagaattatacaagaattttcttcgtttccagattgaggaaaagaaacaaagagaggaagcagagcgagagagactgagaattgcagaagaaaaagaagaaagacggcttgcagaacagagggcacgaattcagcaggagtatgaagaggaacaggaaaagaaaagagagaaagaggaggagcaaaggctaaaaaatgaagagcatattcggttagctgaagaaagacaaaaagaagcagaaagaaagaagaaagaagaagaaggaaaatataacctgcaacttcagcactactgtgaaagagacaatttgattggggaagaaacaaagcacatgagacagccttctcctatagttcctgctcttcagaacaaaattgcaagcaaactccaaagacctccttcagttgacagcaccatacgttcctttattcatgaaagttccatgtccagggcacagtcacccccggtacctgccaggaaaaatcagctccgtgcagaagaggagaaaaaaaatgtaattatggaattatcagaaatgagaaaacagcttcgtagtgaagagaagcgtctacaagagcgattgctacacatggacagtgatgatgaaattcctatcaggaaaaaggaaaggaatcccatggatatatttgatatggctagacatcggttgcaagctcctgtcagaagacagtcccctaagggcttagacgctgccacttttcagaatgttcatgattttaatgagctgaaagatagagattcagaaacacgagttgatctgaaatttatgtacctggatcctccaagagatcatcacaccttagagattcagcagcaagccctgctaagagagcagcagaagaggctgaacagaataaaaatgcaggaaggtgccaaagttgacttagatgccatcccaagtgctaaagtacgagagcaaagaatgcccagagatgacactagtgatttcttgaaaaactcattattggaatctgatagtgcttttattggggcttacggtgagacatatcctgccattgaagatgacgtcctccctccaccatcacagttgccctctgcacgggagcgcaggaggaacaaatggaaaggactagacattgatagcagtcgtcctaatgtagcaccagatggtctctctctaaaatctatatccagtgtaaatgttgatgagcttagagtgagaaatgaggaacgaatgcgaagactgaatgaatttcacaataaacctattaatacagatgatgagagttcactggttgaccctgatgacatcatgaaacacataggggatgacggatcaaactctgtagcaactgagccctggctccgccctggcacttcagaaacgctgaaacgtttcatggcagagcagctgaaccaggagcagcagcagattcctggaaaaccaggcactttcacttggcagggcctgtcgactgcacatggttaaaataaacctgtactggacaaaaaaaaaaa

SEQ ID NO: 290 - DNA, 1194 bp, Homo Sapiens
agtaacaaagaattccagcagtgagctgtgagttctgtccttgctggctttcccaagtggaaggctaccctcatctttcactaatggcagactaggacaagcattacccaggcctgcaagcttgttaaggactaggaacccaagcaagaactcaccatgccaatcaaacctgttgggtggatatgtgggcaggtgttgaagaacttttctggaagaatcgaggggatccagaaagcaatcatggaccttgtagatgagtttaaagatgaatttcccaccatcctaagattatcacagtctaatcagaaaagagaacctgcgcagaaaacatccaaaatcaggatggctattgctttagctaagattaatcgagcaacattaattcgtggattaaacagcatatccagatcctccaaatcagtggccaaacttctgcatcctcagcttgcatgcagacttttagagctaagggacatatctggtcgtctgctgagggaagttaatgcgccgaggcaacccctatataacattcaggtcagaaagggttctttgtttgaaatcatctcctttccagcaaagactgctttaactagcataatatatgcttcatatgcagcactaatttatttggcagtctgtgttaatgctgtgctgaagaaggtaaagaacatcttccaggaagaagaatccataaggcaaaacagagaggagagtgaaaattgtagaaaagccttttctgagcctgtgctttcggagcctatgtttgctgaaggtgaaatcaaagcaaaaccttataggtcattgccggagaagccagacatttcagattaccccaagcttcttgctaataagcagagtaataacatccaagttttacattctgtgtttgaccaatcagctgaaatgaatgagcaaatctgaatacaggtatcactgaacagaacttaagagttatctatttaatggcacatttcatctgacaaaactcagagtctagtttacatattctgaattgctctgctttcttaaaaaaaagagaagggggctactattaaaatgtcattttctagtatttacatgatagagtaaataaaatgaatattgatgtggaataaaaaaaaaaaaaaaaaaaaaaaaaaaaaaaaaaaaaaaaaaaaaaaaaaaaaaaaaaaaaaaaaaaaaaaaaaaaaaaaa

SEQ ID NO: 291 - DNA, 2212 bp, Homo Sapiens
gccgcgagggcggggcccgcagttcggttgcgctgcggagcgcagctgtgagggagtcgctgtgatccggggccccggaacccgagctggagctgaagcgcaggctgcggggcgcggagtcgggaggcctgagtgttccttccagcatgtcggagggggagtcccagacagtacttagcagtggctcagacccaaaggtagaatcctcatcttcagctcctggcctgacatcagtgtcacctcctgtgacctccacaacctcagctgcttccccagaggaagaagaagaaagtgaagatgagtctgagattttggaagagtcgccctgtgggcgctggcagaagaggcgagaagaggtgaatcaacggaatgtaccaggtattgacagtgcatacctggccatggatacagaggaaggtgtagaggttgtgtggaatgaggtacagttctctgaacgcaagaactacaagctgcaggaggaaaaggttcgtgctgtgtttgataatctgattcaattggagcatcttaacattgttaagtttcacaaatattgggctgacattaaagagaacaaggccagggtcatttttatcacagaatacatgtcatctgggagtctgaagcaatttctgaagaagaccaaaaagaaccacaagacgatgaatgaaaaggcatggaagcgttggtgcacacaaatcctctctgccctaagctacctgcactcctgtgacccccccatcatccatgggaacctgacctgtgacaccatcttcatccagcacaacggactcatcaagattggctctgtggctcctgacactatcaacaatcatgtgaagacttgtcgagaagagcagaagaatctacacttctttgcaccagagtatggagaagtcactaatgtgacaacagcagtggacatctactcctttggcatgtgtgcactggagatggcagtgctggagattcagggcaatggagagtcctcatatgtgccacaggaagccatcagcagtgccatccagcttctagaagacccattacagagggagttcattcaaaagtgcctgcagtctgagcctgctcgcagaccaacagccagagaacttctgttccacccagcattgtttgaagtgccctcgctcaaactccttgcggcccactgcattgtgggacaccaacacatgatcccagagaacgctctagaggagatcaccaaaaacatggatactagtgccgtactggctgaaatccctgcaggaccaggaagagaaccagttcagactttgtactctcagtcaccagctctggaattagataaattccttgaagatgtcaggaatgggatctatcctctgacagcctttgggctgcctcggccccagcagccacagcaggaggaggtgacatcacctgtcgtgcccccctctgtcaagactccgacacctgaaccagctgaggtggagactcgcaaggtggtgctgatgcagtgcaacattgagtcggtggaggagggagtcaaacaccacctgacacttctgctgaagttggaggacaaactgaaccggcacctgagctgtgacctgatgccaaatgagaatatccccgagttggcggctgagctggtgcagctgggcttcattagtgaggctgaccagagccggttgacttctctgctagaagagaccttgaacaagttcaattttgccaggaacagtaccctcaactcagccgctgtcaccgtctcctcttagagctcactcgggccaggccctgatctgcgctgtggctgtccctggacgtgctgcagccctcctgtcccttccccccagtcagtattaccctgtgaagccccttccctcctttattattcaggagggctgggggggctccctggttctgagcatcatcctttcccctcccctctcttcctcccctctgcactttgtttacttgttttgcacagacgtgggcctgggccttctcagcagccgccttctagttgggggctagtcgctgatctgccggctcccgcccagcctgtgtggaaaggaggcccacgggcactaggggagccgaattctacaatcccgctggggcggccggggcgggagagaaaggtggtgctgcagtggtggccctggggggccattcgattcgcctcagttgctgctgtaataaaagtctactttttgctaaaaaaaaaaaaaaa

SEQ ID NO: 292 - DNA, 5458 bp, Homo Sapiens
aagcgtcggacgcggcccggcgccgagccatggagcctgagccagtggaggactgtgtgcagagcactctcgccgccctgtatccaccctttgaggcaacagcccccaccctgttgggccaggtgttccaggtggtggagaggacttatcgggaggacgcactgaggtacacgctggacttcctggtaccagccaagcacctgcttgccaaggtccagcaggaagcctgtgcccaatacagtggattcctcttcttccatgaggggtggccgctctgcctgcatgaacaggtggtggtgcagctagcagccctaccctggcaactgctgcgcccaggagacttctatctgcaggtggtgccctcagctgcccaagcaccccgactagcactcaagtgtctggcccctgggggtgggcgggtgcaggaggttcctgtgcccaatgaggcttgtgcctacctattcacacctgagtggctacaaggcatcaacaaggaccggccaacaggtcgcctcagtacctgcctactgtctgcgccctctgggattcagcggctgccctgggctgagctcatctgtccacgatttgtgcacaaagagggcctcatggttggacatcagccaagtacactgcccccagaactgccctctggacctccagggcttcccagccctccacttcctgaggaggcgctgggtacccggagtcctggggatgggcacaatgcccctgtggaaggacctgagggcgagtatgtggagctgttagaggtgacgctgcccgtgagggggagcccaacagatgctgaaggctccccaggcctctccagagtccggacggtacccacccgcaagggcgctggagggaagggccgccaccggagacaccgggcgtggatgcaccagaagggcctggggcctcggggccaggatggagcacgcccacccggcgaggggagcagcaccggagcctcccctgagtctcccccaggagctgaggctgtcccagaggcagcagtcttggaggtgtctgagcccccagcagaggctgtgggagaagcctccggatcttgccccctgaggccaggggagcttagaggaggaggaggaggaggccagggggctgaaggaccacctggtacccctcggagaacaggcaaaggaaacagaagaaagaagcgagctgcaggtcgaggggctcttagccgaggaggggacagtgccccactgagccctggggacaaggaagatgccagccaccaagaagcccttggcaatctgccctcaccaagtgagcacaagcttccagaatgccacctggttaaggaggaatatgaaggctcagggaagccagaatctgagccaaaagagctcaaaacagcaggcgagaaagagcctcagctctctgaagcctgtgggcctacagaagagggggccggagagagagagctggaggggccaggcctgctgtgtatggcaggacacacaggcccagaaggccccctgtctgacactccaacacctccgctggagactgtgcaggaaggaaaaggggacaacattccagaagaggcccttgcagtctccgtctctgatcaccctgatgtagcttgggacttgatggcatctggattcctcatcctgacgggaggggtggaccagagtgggcgagctctgctgaccattaccccaccgtgccctcctgaggagcccccaccctcccgagacacgctgaacacaactcttcattacctccactcactgctcaggcctgatctacagacactggggctgtccgtcctgctggaccttcgtcaggcacctccactgcctccagcactcattcctgccttgagccaacttcaggactcaggagatcctccccttgttcagcggctgctgattctcattcatgatgaccttccaactgaactctgtggatttcagggtgctgaggtgctgtcagagaatgatctgaaaagagtggccaagccagaggagctgcagtgggagttaggaggtcacagggacccctctcccagtcactgggtagagatacaccaggaagtggtaaggctatgtcgcctgtgccaaggtgtgctgggctcggtacggcaggccattgaggagctggagggagcagcagagccagaggaagaggaggcagtgggaatgcccaagccactgcagaaggtgctggcagatccccggctgacggcactgcagagggatgggggggccatcctgatgaggctgcgctccactcccagcagcaagctggagggccaaggcccagctacactgtatcaggaagtggacgaggccattcaccagcttgtgcgcctctccaacctgcacgtgcagcagcaagagcagcggcagtgcctgcggcgactccagcaggtgttgcagtggctctcgggcccaggggaggagcagctggcaagctttgctatgcctggggacaccttgtctgccctgcaggagacagagctgcgattccgtgctttcagcgctgaggtccaggagcgcctggcccaggcacgggaggccctggctctggaggagaatgccacctcccagaaggtgctggatatctttgaacagcggctggagcaggttgagagtggcctccatcgggccctgcggctacagcgcttcttccagcaggcacatgaatgggtggatgagggctttgctcggctggcaggagctgggccgggtcgggaggctgtgctggctgcactggccctgcggcgggccccagagcccagtgccggcaccttccaggagatgcgggccctggccctggacctgggcagcccagcagccctgcgagaatggggccgctgccaggcccgctgccaagagctagagaggaggatccagcaacacgtgggagaggaggcgagcccacggggctaccgacgacggcgggcagacggtgccagcagtggaggggcccagtgggggccccgcagcccctcgcccagcctcagctccttgctgctccccagcagccctgggccacggccagccccatcccattgctccctggccccatgtggagaggactatgaggaagagggccctgagctggctccagaagcagagggcaggcccccaagagctgtgctgatccgaggcctggaggtcaccagcactgaggtggtagacaggacgtgctcaccacgggaacacgtgctgctgggccgggctagggggccagacggaccctggggagtaggcaccccccggatggagcgcaagcgaagcatcagtgcccagcagcggctggtgtctgagctgattgcctgtgaacaagattacgtggccaccttgagtgagccagtgccaccccctgggcctgagctgacgcctgaacttcggggcacctgggctgctgccctgagtgcccgggaaaggcttcgcagcttccaccggacacactttctgcgggagcttcagggctgcgccacccaccccctacgcattggggcctgcttccttcgccacggggaccagttcagcctttatgcacagtacgtgaagcaccgacacaaactggagaatggtctggctgcgctcagtcccttaagcaagggctccatggaggctggcccttacctgccccgagccctgcagcagcctctggaacagctgactcggtatgggcggctcctggaggagctcctgagggaagctgggcctgagctcagttctgagtgccgggcccttggggctgctgtacagctgctccgggaacaagaggcccgtggcagagacctgctggccgtggaggcggtgcgtggctgtgagatagatctgaaggagcagggacagctcttgcatcgagaccccttcactgtcatctgtggccgaaagaagtgccttcgccatgtctttctcttcgagcatctcctcctgttcagcaagctcaagggccctgaaggggggtcagagatgtttgtttacaagcaggcctttaagactgctgatatggggctgacagaaaacatcggggacagcggactctgctttgagttgtggtttcggcggcggcgtgcacgagaggcatacactctgcaggcaacctcaccagagatcaaactcaagtggacaagttctattgcccagctgctgtggagacaggcagcccacaacaaggagctccgagtgcagcagatggtgtccatgggcattgggaataaacccttcctggacatcaaagcccttggggagcggacgctgagtgccctgctcactggaagagccgcccgcacccgggcctccgtggccgtgtcatcctttgagcatgccggcccctcccttcccggcctttcgccgggagcctgctccctgcctgcccgcgtcgaggaggaggcctgggatctggacgtcaagcaaatttccctggccccagaaacacttgactcttctggagatgtgtccccaggaccaagaaacagccccagcctgcaacccccccaccctgggagcagcactcccaccctggccagtcgagggatcttagggctatcccgacagagtcatgctcgagccctgagtgaccccaccacgcctctgtgacctggagaagatccagaacttgcgtgcagcttctcctctcagcacactttgggctgggatggcagtggggcataatggagccctgggcgatcgctgaatttcttccctctgcttcctggacacagaggaggtctaacgaccagagtattgccctgccaccactatctctagtctccctagcttggtgccttctcctgcaggagtcagagcagccacattgcttgccttcataccctggaggtggggaagttatccctcttccggtgctttcccatcctgggccactgtatccaggacatcactcccatgccagccctccctggcagcccatgttctcctcttttctcaccccctgactttccctgagaagaatcatctctgccaggtcaactggagtccctggtgactccattctgaggtgtcacaagcaatgaagctatgcaaacaataggagggtgtgacaggggaaccgtagactttatatatgtaattactgttattataatactattgttatattaaatgtatttactcacactttgcctctaaggagctagagtagtcctctggattaaggtgataaataacttgagcactttccctcaaccagcccttaactagaacacagaaaataaaaccaagactggaaggtcccctctacccctcccaggcccagagctagctgactgtgtatgagcctgggagaatgtgtctcctccacagtggctcccagaggttccacacactctctgaagctccttctcccacactgcacctactccttgaggctgaactggtcacagacaaactgggatccagcacagtccagcagttctcaaaatgaggtcctcaggccacagtgcgtgaga

SEQ ID NO: 293 - DNA, 1761 bp, Homo Sapiens
cacgaggggaagggtcacgcgctcggtgtgctgagagtgtcctgcctggtcctctgtgcctggtggggtgggggtgccaggtgtgtccagaggagcccagttggtagtgaggcagccatggggctagaagcactggtgcccctggccatgatagtggccatcttcctgctcctggtggacctgatgcaccggcaccaacgctgggctgcacgctacccgccaggtcccctgccactgcccgggctgggcaacctgctgcatgtggacttccagaacacaccatactgcttcgaccagttgcggcgccgcttcggggacgtgttcaacctgcagctggcctggacgccggtggtcgtgctcaatgggctggcggccgtgcgcgaggcgatggtgacccgcggcgaggacacggccgaccgcccgcctgcgcccatctaccaggtcctgggcttcgggccgcgttcccaaggggtgatcctgtcgcgctatgggcccgcgtggcgcgagcagaggcgcttctccgtgtccaccttgcgcaacttgggcctgggcaagaagtcgctggagcagtgggtgaccgaggaggccgcctgcctttgtgccgccttcgccgaccaagccggacgcccctttcgccccaacggtctcttggacaaagccgtgagcaacgtgatcgcctccctcacctgcgggcgccgcttcgagtacgacgaccctcgcttcctcaggctgctggacctagctcaggagggactgaaggaggagtcgggcttcctgcgcgaggtgctgaatgctgtccccgtcctcccgcacatcccagcgctggctggcaaggtcctacgcttccaaaaggctttcctgacccagctggatgagctgctaactgagcacaggatgacctgggacccagcccagccaccccgagacctgactgaggccttcctggcaaagaaggagaaggccaaggggagccctgagagcagcttcaatgatgagaacctgcgcatagtggtgggtaacctgttccttgccgggatggtgaccaccttgaccacgctggcctggggcctcctgctcatgatcctacacctggatgtgcagcgaggaaggagagtgtcccctgggtgctcacccattgtggggacgcatgtctgtccagtccgtgtccaacaggagatcgacgacgtgatagggcaggtgcggcgaccagagatgggtgaccaggttcacatgccctacaccactgccgtgattcatgaggtgcagcgctttggggacatcgtccccctgggtgtgacccatatgacatcccgtgacatcgaagtacagggcttccgcatccctaagggaacgacactcatcaccaacctgtcatcggtgctgaaggatgaggccgtctgggagaagcccttccgcttccaccccgaacacttcctggatgcccagggccactttgtgaagccggaggccttcctgcctttctcagcaggccgccgtgcatgcctcggggagcccctggcccgcatggagctcttcctcttcttcacctccctgctgcagcacttcagcttctccgtggccgccggacagccccggcccagccactctcgtgtcgtcagctttctggtgaccccatccccctatgagctttgtgctgtgccccgctagaatggggtacctagtccccagcctgctccctagccagaggctctaatgtacaataaagcaatgtggtagttccaaaaaaaaaaaaaaaaaaaa

SEQ ID NO: 294 - DNA, 1937 bp, Homo Sapiens
cccgaatgcactggagtggggatggtccatcggcaactataaactgattctcatcaggaaactgcacattatctccccatcacttcaaaggtctcgtcaggcagaggtgacgccaggagatgatttaaaggtgaaaatgacaaggtttccacccctcaaaccttggctccttttctgacaatacagtctgaatgaacccgatgtctttttttttactgtggaaataggatcggaagagagtaacatttttttttttttaatcctgataaagaagattgttgggaagctctttgaaaaaaaattttaaattgtggcacagatggattttaaaaagtgttagatctttccaatgaacactaatagagtactctgctcttggctggatttttcagagaatggcaatggtctctgcgatgtcctgggtcctgtatttgtggataagtgcttgtgcaatgctactctgccatggatcccttcagcacactttccagcagcatcacctgcacagaccagaaggagggacgtgtgaagtgatagcagcacaccgatgttgtaacaagaatcgcattgaggagcggtcacaaacagtaaagtgttcctgtctacctggaaaagtggctggaacaacaagaaaccggccttcttgcgtcgatgcctccatagtgattgggaaatggtggtgtgagatggagccttgcctagaaggagaagaatgtaagacactccctgacaattctggatggatgtgcgcaacaggcaacaaaattaagaccacgagaattcacccaagaacctaacagaagcatttgtggtagtaaaggaaaaccaaccctctggaaaatacattttgagaatctcaaacatctcacatatatacaagccaaatggatttcttacttgcactttgactggctaccagataatcacagtgcgtttactgtgtgtaacgaaatatcctacagtgagaagacacagcgttttggcaacaccatggaaagtgggcttaaaaaagggttttctcagtgaaatttttgggcatcatgaagaacgatcaactatcttctaatttgaatctatagttactttgtaccatttgaaatatatgtatatatatatatataatattttgaaatattatctattctcttcaagaaatgaacagtaccacagtttgagacggctggtgtacccctttgagttttggatgttttgtctgttttgctttgttttgttagtcatttctttttctaacggcaaggaagatatgtgcccttttgagaattcaagatggcactgacacgggaaggccagctacaggtggactcctggaatttgaggcatcataatgatactgaatcaagaacttccttctgcttctaccagatggcccaaggaagcacatcgtcctgttttattgctttctaccctgtgcaatattagcatgcaagcttggcttacatagtcatactttatattcaattgatatataataaccgttctaacctcttccaggaaaatatttttagaactactagcttttccacttagaagaaaatgaggattcttaagggagccactccaccatgctattaagactctggcagagttatgggtaggatatggatccctacatgaataagtcctgtaaatacaatgtcttaaggctttgtatagctgtcctagactgcagaaatgtcctctgattaaatccaaagtctggcatcgttaactacatagtgctgtagcaacaagtcttatcatggcatctctttctatgtttggtttgctttttccaagagtattcaggtctcctcttgtgagataggaaggccatgaaaacaattagatttcaagatgatctatgtgaccaaatgttggacagccctattaaagtggtaaacaacttctttctaaaaaaaaaaaaaaaaaaaaaaaaa

SEQ ID NO: 295 - DNA, 4047 bp, Homo Sapiens
gcggcggcgcgaggcagtatggtttgaagtggtgaacatggatttttctcggcttcacatgtacagtcctccccagtgtgtgccggagaacacgggctacacgtatgcgctcagttccagctattcttcagatgctctggattttgagacggagcacaaattggaccctgtatttgattctccacggatgtcccgccgtagtttgcgcctggccacgacagcatgcaccctgggggatggtgaggctgtgggtgccgacagcggcaccagcagcgctgtctccctgaagaaccgagcggccagaacaacaaaacagcgcagaagcacaaacaaatcagcttttagtatcaaccacgtgtcaaggcaggtcacgtcctctggcgtcagctacggcggcactgtcagcctgcaggatgctgtgactcgacggcctcctgtattggacgagtcttggattcgtgaacagaccacagtggaccacttctggggtcttgatgatgatggtgatcttaaaggtggaaataaagctgccattcagggaaacggggatgtgggagtcgccgccgccaccgcgcacaacggcttctcctgcagcaactgcagcatgctgtccgagcgcaaggacgtgctcacggcgcaccccgcggcccccgggcccgtgtcgagagtttattctagggacaggaatcaaaaatgcgacgactgtaagggcaagaggcacctcgacgcgcaccccggtcgggcagggaccctctggcacatctgggcatgtgcaggttacttcttgctgcagattctgcgcaggatcggagctgtgggccaggctgtgtccaggacggcgtggtcggccctttggctggccgtggttgctccagggaaggcagcctctggagtgttctggtggctggggattggatggtaccagtttgttactttgatttcttggctgaatgtgtttcttcttaccaggtgccttcgaaacatctgcaagtttttagtcttgctcatcccactcttccttttactagcaggtctctccttacggggccagggcaatttcttttcgttcttgcccgtgttgaactgggcaagcatgcatagaacacagcgggtggatgacccccaggacgtgtttaaacccacgacttctcgcctgaagcagcctctgcagggtgacagtgaggcttttccgtggcattggatgagtggcgtggagcagcaggtggcctctctgtctggacagtgccaccaccatggtgagaatctccgagagctgaccactttgctacagaagctgcaggctcgggtggaccagatggaaggcggcgctgccgggccgtcagcttcggtcagagacgctgtgggacagcccccgagggagactgactttatggcctttcaccaagaacatgaagtgcgtatgtcacacttggaagatattctgggaaaactgagagaaaaatctgaggccatccagaaggaactagaacagaccaagcaaaaaacaatcagtgcggttggtgagcagctcctgcccacagtcgagcacctccagctggagctggatcagctaaagtcagagctgtccagctggcgacacgtgaagaccggctgtgagacagtggatgccgtacaagaaagagtggacgtgcaagtcagagaaatggtgaaactcctgttttccgaagatcagcaaggcggttctctggaacagctgctgcagaggttctcatcacagtttgtgagcaaaggcgacttgcagacgatgctgcgagacctgcagctgcagatcctgcggaacgtcacccaccacgtttccgtgaccaagcagctcccaacctcagaagccgtggtgtctgctgtgagcgaggcgggggcgtctggaataacagaggcgcaagcacgtgccatcgtgaacagcgccttgaagctgtattcccaagataagaccgggatggtggactttgctctggaatctggtggtggcagcatcttgagtactcgctgttctgaaacttacgaaaccaaaacggcgctgatgagtctgtttgggatcccgctgtggtacttctcgcagtccccgcgcgtggtcatccagcctgacatttaccccggtaactgctgggcatttaaaggctcccaggggtacctggtggtgaggctctccatgatgatccacccagccgccttcactctggagcacatccctaagacgctgtcgccaacaggcaacatcagcagcgcccccaaggacttcgccgtctatggattagaaaatgagtatcaggaagaagggcagcttctgggacagttcacgtatgatcaggatggggagtcgctccagatgttccaggccctgaaaagacccgacgacacagctttccaaatagtggaacttcggattttttctaactggggccatcctgagtatacctgtctgtatcggttcagagttcatggcgaacctgtcaagtgaagacactactcattatttttgtacatttttgtatatactgggacagcgtgaaacactggaatccttcatggacgagggcatatacaatgatgggacagtgccacactccttcaataaacgtggctgctggccagaggacgtgagcgtgtgacgggcgccttggcgccacctgttgggtgctcactgcctctgcaggtgcagaggggtcagcagcaggagaagcgtgttgaacacgtggctctcagacactccttgtttttaacgggaagctctttgcatttgcatttcctcaacaaaggagcaaagcagaggaagctgagagtctggcgtgttcttgacgctttggtcttcagccttgcactggctcttctaaaggacttttggagggcagataatttcatctgttaaatccaacacacatttctttcagggaaaaacaatgtcaccaaattttcagagttctaaactcctttccttcaagccggaattttccttttttcagcaccagtaggtactaagtctccagatggggaaataactaaaatgtgtttttctgctttgttcgctcttacttctgaggaaggtttccagtcaggactcgctgtaccaatatccatggaggaatatgggagcgtttcgctctccttgtaggctgaagtcagtctgacttgaaggggcctggtttggatctaagcaaacacccagatggggttctctggtctcagcaaggcttttcctgttgggagtcacagtaaacagaaacccaaaaatctcatcttgggtgttttcagggcttgttttgagttttgctgaatagggagcgcaagacgccctgagcctccctctcactggtggtgataagaggagccgtctggtgtgtcagggtcacgaacccgttacatttcaggacgatcctttttccttcagcagcatttcttactggctgtggctggaatctgccttttatcacagctgtcaccattctcacgtgattcttgtgagactctttttggttataattactatttaatatttagactattttactgagcagactttataaatgagatatctacaaggcacttaaagtgttacagatgttttaccttaagaattatttaagttgtgttgggttaagacagttttcagtgtaccgtaaatgttgtgttttcagaaaaagacaaaacgatggtgctgactggttttctgtatattgcacaacagtcctcaaatacactgatgtatgaaactattcatacatcaagcagcatttttttcactctccttagaattggaactatgcagttaaggcagataaaatgtacagatgtttcatatattacaggttacatatataaatcaaaatttcctatataaaactgatttgggatttggggtggaaatattttgaatattaatttatttttaaagatgcaagataggactttgtgcaatgtatttttgtaaatgcttttcaaaatatctgtctttggtagtgcttctgctgctgccaccaaattgataagatgctattaagaggtttaaataaagagttttaatttttaaaaggg

SEQ ID NO: 296 - DNA, 4229 bp, Homo Sapiens
ggcggcggcgggcgcgggaagatggcggcagcggcggcggcggctgcagaacagcaaagttccaatggtcctgtaaagaagtccatgcgtgagaaggctgttgagagaaggagtgtcaataaagagcacaacagtaactttaaagctggatacattccgattgatgaagatcgtctccacaaaacagggttgagaggaagaaagggcaatttagccatctgtgtgattatcctcttgtttatcctggctgtcatcaatttaataataacacttgttatttgggccgtgattcgcattggaccaaatggctgtgatagtatggagtttcatgaaagtggcctgcttcgatttaagcaagtatctgacatgggagtgatccaccctctttataaaagcacagtaggaggaaggcgaaatgaaaatttggtcatcactggcaacaaccagcctattgtttttcagcaagggacaacaaagctcagtgtagaaaacaacaaaacttctattacaagtgacatcggcatgcagttttttgacccgaggactcaaaatatcttattcagcacagactatgaaactcatgagtttcatttgccaagtggagtgaaaagtttgaatgttcaaaaggcatctactgaaaggattaccagcaatgctaccagtgatttaaatataaaagttgatgggcgtgctattgtgcgtggaaatgaaggtgtattcattatgggcaaaaccattgaatttcacatgggtggtaatatggagttaaaggcggaaaacagtatcatcctaaatggatctgtgatggtcagcaccacccgcctacccagttcctccagtggagaccagttgggtagtggtgactgggtacgctacaagctctgcatgtgtgctgatgggacgctcttcaaggtgcaagtaaccagccagaacatgggctgccaaatctcagacaacccctgtggaaacactcattaaaagaaccccagaggtcaccaacatgtttatatcttgacttgacttttttatgcatgcaaatcattgtttttacagagtttgtgataactcataattattttaatggcagagcactgctgtatctgttttatggtctacatagttaaaatcttctcagagagcctaaattctaatacattttattaatttatactaatcttcatatttactgttctctaaaataattatgagaagcaaataaaatcaaaagtcatgtttaaagacgtgtttttaaaattccactatcccttttctaaaggttaaaggtctgaagcagctgtttagattcactgtaagtaaactttggtaactctaatggggatagacccacttaagatatttaaaaaggtatggcatcagcgtttcatgctctgccttttagcttctaaaaggaaagatgcagatttctagtgcattaagcctgagccatattctcacatgcaagtgaagtcattaaagaactttacatatgtgagatagaaacaatggttccttagttttgcactgggaagaaaatattttgtaaaagaatgtttatttgaaataatgataactatcaattgttcacaatgtggtggaaattaaaacaccatctcagctttaacttttaaataataatgataactatctttattgagcatcttctacatcctaggcattgtcctaggcattgcatgtttatatccccaattctcaccacaaccctgcaagtaggtggtattatccaagttttacccattaagaaactgaagatcagagaagttaagaaacttgctcaacatcatatagtaagtagcagagttgggattggaattcaggcatgactcaaacctggatgtacttgattccaaatgccatgttgttttcactctctgcactgactttttaattatttaaaactctagaaagatgaacaaaggttaatttaaacttacctaagaagatgagaatcaaacaaaacagatatgcttactctagttaaaaagaaaataaatctcatgtcagacccagaaaggaccaatcactgtccgattgtaagctatgttgggccaattccaaaatattatacgatggagaggtcaaatttacctacttctgagttacctcagtttcccaacaatggaccttggcacactggagtaacaatacataacagagttgccaagatatttataccctcagcactcggggcaacacagtggaaagtggggaggccatagacccaaacaagttctttgggccaggcatggcctagtaagtacaccatgcctcgaaaataagtccagaagcactggactaaagagtgctaatgcaggaaataatacacataatttttaggtaaggataataatttatctctgctcctaatattactatcccattgtaattatttataaccctcaagccagttgatttttaatatatttgattggaaaagaactctctggtattattaagactcacacagaatcagggacagggcccccaaaggagtttgctgtaaaataggcagtagagttgtggcatgggcccaaccctgcattcaagtgtaacagcattctgtcagggtcactttgaattgtgcacataagaaaaccaatacaaaaaacaatttgtattcaatattgtcacatttctctctggtagaaaaatcaaataccttagagattatgaagtcattaatttatactgaaattggattgacttactacctaacactgagcgctgtttttaaatgaaaagaatgagatttataaccacttgagtgttattgcagtgatatttgaactcatttgaatatattcagtatcatttaatgtctgaattcagaaaaaaatgccgaaatttttattcagatggtccataaattaaattgcatattcattacttatctgctctatttagatttattttaaaagtttatttaagtaaatatttttataaaaaccagaaaacactgtattacaaaatattatttattaaatgtagttcaggaaataatctatttttactcttttttgggaaatacttgtgtttttgatacatctccatgaagttcttttgagaggagaggctattttgatgtttttatacaactgaaggttaacagccatagcattttatgatactttacaggtagtcctggctttttccctgaaacataagcttggaaaatctattagaaagcagaacagggcaaactctccattttacttatggcttttctaatttttaattaattaatttatttttttgagacagagtcttgttctgtcgccaggctggagtgcagtggcacaatctcggctctcggctcactgcaacctctgcctcccaggttcaagcgattctcctgcctcagcctcccgagtacctgggactacaggcatgtgccacagttcccggctaatttttgtatttttagtagagacggggtttcaccatgttggccaggatggtctcaatctcttgacctcgtgatctgcctgccttggcctcccaaagtgctgggattacaggtgtgagccaccacgcctggccggcttatttttatccacagtaaatcttcagcaactcattgtctccaccagatagtatttttctgtaaatgaaatgctgacttcgcctcttcctgctgtatgctcatccctgcactgagcacagatatgacaagcagtagccatgggggaggtgggtgacaaagataggaccccgggagggggcgcaggtacatgctagtttcaattaccacagtattctagagacgggttgcaatgacaaggggggcaaatgaaatcaatgcaagatttcttaataatgggcagacagaaaaatgtaaaaccacacaaaacggactgctgataatattttaaaatatacttatttgtcttctttttgcattgtgaaaaaaacaaaataaattttgtgtgataattttgatgatgaaaggtggaagttctacctagatttgaatgagtgtttttttaagggaatgagaatgtcatggtgctaaacctgacaaataagagatcattgaaatgctgaaaattttaacagtcttcttaaaagtattgagggggcaaaaattaccaattatggtatacaaaaataagcctataaatgtgtttcacattgctaacttgagtttcagttgattcagtttgtaataactagtaatgagcttctgtttacaataaaaattctgtaaattg

SEQ ID NO: 297 - DNA, 1288 bp, Homo Sapiens
ttggtttgggccaggtggactggaaggggcggaggtaaccagaagcggctagtggcggctgcctgcgtccccaaccccctccgcgcagcgctcgcgacacgcgtgccaggagtgggagcgagcggcggggccagctgcgttctgagcctgggcgcagctgccatctgctctgggaagcaccagggtgtccccgccgccctcagctcgaagtcagccaccatggaggcgcaggcacaaggtttgttggagactgaaccgttgcaaggaacagacgaagatgcagtagccagtgctgacttctctagcatgctctctgaggaggaaaaggaagagttaaaagcagagttagttcagctagaagacgaaattacaacactacgacaagttttgtcagcgaaagaaaggcatctagttgagataaaacaaaaactcggcatgaacctgatgaatgaattaaaacagaacttcagcaaaagctggcatgacatgcagactaccactgcctacaagaaaacacatgaaaccctgagtcacgcagggcaaaaggcaactgcagctttcagcaacgttggaacggccatcagcaagaagttcggagacatgagacgaaagtaggcggtacgaaccctaatggaggcagttttgaggaggtcctcagctccacggcccatgccagtgcccagagcttggcaggaggctcccggcggaccaaggaggaggagctgcagtgctaagtccagccagcgtgcagctgcatccagaaaccggccactacccagcccatctctgcctgtgcttatccagataagaagaccaaaatcccgctgggaaaaacccaggccttgacattgttattcaaatggcccctccagaaagtttaatgatttccatttgtatttgtgttgatgatggaccacttgaccatcacatttcagtattcatagatgactgtcacattttaaaatgttcccacttgagcaggtacacaactggtcataattcctgtctgtgtaattcgatgtatatttttccaaacatgtagctattgtttgctttgatttttgcttggcctcctttatgatgtgcatgtccttgaaggctgaatgaacagtccctttcagttcagcagatcaacaggatggagctcttcatgactgtctccagcaataggatgatttactataaatttcatccaactacttgtgatctctctcacctacatcaattatgtatgttaatttcagcaattaaaagaattgattttaatgacaaaaaaaaaaaaaaaaaa

SEQ ID NO: 298 - DNA, 1174 bp, Homo Sapiens
gcctcggtcgccacggtaacgcgcgcgggcaggtgtccgaccatgagcgtccgggtcgcacgggtagcgtgggtcaggggcttgggcgccagctaccgccgcggcgcctcgagcttcccggtgcctccgccgggcgcccagggtgtagcggagctgctgcgagatgcgaccggggcggaggaggaggcgccctgggcggcgacggagcggcgaatgccgggccagtgctccgtgctgctcttcccgggccagggcagccaggtggtgggcatgggccgcggtctgctcaactacccgcgcgtccgcgaactctacgccgccgcccgccgcgtgctgggctacgacctgctggaactgagcctgcacgggccgcaggagaccctggaccgcaccgtgcactgtcagcccgcgatcttcgtggcatcgctggccgctgtcgagaaactacatcacctgcagccctcggtgattgagaactgtgttgctgctgctggattcagtgtgggagagtttgcagccctagtgtttgccggagccatggaatttgctgaaggctctacggtttctccagaagaattcctctaagtttcatttcagacgcaccaggatgttgccggttagtggcgcattccacacccgcctcatggagccagccgtggagcccctgacgcaagctttaaaggcagtcgacattaagaagcctctggtttctgtctactccaacgtccacgcgcatagatacaggcatcccgggcacatccacaagctgctggcccagcagctggtctccccagtgaagtgggagcagacgatgcatgccatatacgaaaggaaaaagggcagggggttcccccaaactttcgaagtaggccctggcaggcagctgggagccatcctgaagagctgtaacatgcaggcctggaagtcctacagcgccgtggatgtgctgcagaccctcgaacatgtggacctggaccctcaggagcccccgagatgactgcagggggctcaaatgcgatgaccccctctgtcctcctgaggagaggctgtaggctgtgcctgtcgccccctaccttcctaatggctcctcctctgaggagtgaaagggatttgtttgcaacgtgctttgaaggccacataaaaagccctaaaaatgagaaaaaaaaaaaaaaaa

SEQ ID NO: 299 - DNA, 1210 bp, Homo Sapiens
atggccatcatgatcgtgacctacacgcgcatctaccgcatcgcccaggtgcagatccgcaggatttcctccctggagagggccgcagagcacgtgcagagctgccggagcagcgcaggctgcgcgcccgacaccagcctgcggttttccatcaagaaggagaccgaggttctcaagaccctgtcggtgatcatgggggtcttcgtgtgttgctggctgcccttcttcatccttaactgcatggtccctttctgcagtggacaccccaaaggccctccggccggcttcccctgcgtgtttgcccagctgctggggtgcagccacgtctgctcccgcacgccggtggagacgatgaacatcagcaatgagctcatctcctacaaccaagacacggtcttccacaaggaaatcgcagctgcctacatccacatgatgcccaacgccgttccccccggggaccgggaggtggacaacgatgaggagaaggagagtcctttcgatcgcatgtcccagatctatcagacatccccagatggtgaccctgttgcagagtctcgcgggcgcaggcgcccagaggcgcacaggagacctcaggcccagactccactccccagctgtgaaaggactgctggccagacccccaagctagcccgccaggcctccatagagctgcccagcatggctgcatccagtaccaagagttggtgggagacgggtgaggtacaggctcagtctgcggccaagactccgtcctgcaaggatattgtggctggagacatgagcaagaaaagcctctgggagcagaagggaggctccaagacctcatcaacaattaagactctttggcagttgcactgggtactggctgagttctggaaaacaggaatgtgagcagagtgctgcagatctccttgtcaggagcacctaagaactggcatgactctacaccctctctccttctgcaatgacctcgtgtcaagatggcagacccgcagagatgaatgtgcctggatacctgagtcaccaggtggaggaaactcccattgacatgcatcacactccacatatgaaacccttctttttctgcactgtcactggggttagggattattactcactgcaacttagcctagcattaagttgcttgactaatacaagtttcaataaatgtcgcttcatttcccatgaaaaaaaaaaaaaaaaaaaaaaa

SEQ ID NO: 300 - DNA, 8138 bp, Homo Sapiens
cctgcggcgctggagccttgacgcacggagctcgagagcgagaacgggagagaaaggggtagaaatggcggctccgctcggctcccgctgaggagggcgaagccggcggagtgtctgtgctgccggtctgcagcaccgcccccgcttcccgcacgccgcctgctcacgccgacttcccttcctctgcccggctctctcttgtgctcgtctgcgctccgcacgctccgggccggctcgtctctcattgcccggctcggctccgctggccctgactgaccggccggcgggccggccttgctcggctctcccgggcgcggcgtggactccgtccccctggctggaccatggtgaacacccggaagagctctctccgccttctcgggtccaagtctcctggtcccgggcctgggcctggggccggagcagagcctggggcgaccggaggcagcagccatttcatctcctctcggacccgctcctccaagacccgcgccgccagctgccccgccgccaaagccgggggaagcggtggcgccggcgtcactctggatgaggccaggaaagttgaagttgatggtagtttaagtgatagccacgtatctcctccagccaaacgcactttgaaacaacctgattctgtttgcaaagacaaatcaaaatcacgaagtactggtcagcgagaggaatggaacttatcaactggacaggccaggttaacttctcagcctggtgctacattaccaaatggacatagtggcttatcccttcgaagccatccccttcgaggggaaaagaagggagatggggacctttcttgtataaatggtgacatggaagtcagaaaaagttgtcgttccaggaaaaacagatttgaaagtgtgaaccagagtttgttatttgatcaactagtaaatagcactgctgaagctgtactacaggaaatggacaacattaacatccgacagaatcgtcgatcaggagaagtagaacgacttcgaatgtggacagatacagaatttgaaaacatggatatgtattcaagagtgaaaaggcgaagaaagtcactaagaagaaatagttatgggatacaaaatcatcatgaagtttctactgagggtgaagaagaagctagaacctctaaattgcttcctttggagaaaatcagtatagaatctcaagaggaggatggagatatagaagttgaagaggcagaaggagaagaaaatgatagaccatataatttgagacagagaaaaacagtggatcgataccaagcacctccaatagtaccagctcatcaaaaaaagagggaaaacacgctgtttgatattcatagatctccagcaagaagaagccatattaggagaaagaagcatgccattcatagtagtgacacaacttcttctgatgaggaacgctttgaaagaaggaaatcaaagagcatggcaagagcaagaaatagatgtttgcctatgaacttcagagcagaggacttagctagcggtattctccgagaacgagtgaaagtgggtgcaagcttggctgatgttgatccaatgaacattgataaatcagtacggtttgatagcataggtggattgagccatcatattcatgcgctaaaggaaatggtagtattcccacttttatatccagaaatttttgaaaagtttaaaattcagcctccaaggggctgtttgttttatggccctcctggcacaggtaaaaccttggttgccagagcattagctaatgaatgcagccaaggagacaaaaaagtggctttttttatgcgaaaaggagcagattgtttgagcaagtgggttggtgaatctgaaaggcaacttaggcttctttttgatcaggcatatttgatgagaccttctataatattttttgatgaaatagatggattagctccagttcgctctagcagacaagatcagatccacagctctatagtatcaaccctccttgctcttatggatggattagataataggggtgaaattgttgttattggtgctacaaacagacttgactctatagatcctgcactcaggagacctggtcgttttgacagagaattcctcttcaacctgcctgatcaaaaggcaagaaaacacatcttacagatccataccagggactggaatccaaaattgtcagatgcatttttaggtgaattggctgaaaaatgtgttggctactgtggagccgatatcaaggccctgtgcactgaagccgccctgattgcactgcggaggcgttatccccagatctatgctagcagtcataaactgcagctggatgtttcctcaatagtgcttagtgcccaagatttttaccatgcaatgcagaatatcgtgcctgcttcccaacgtgctgtgatgtcttcagggcatgcactatcccccatcataagaccactgctggaaagaagcttcaacaacatcctagcagtcttgcaaaaagtgtttcctcatgctgaaattagccagagtgacaaaaaagaagatatagaaactttaattttagaggatagtgaagatgaaaatgctttatcaatttttgagaccaattgtcactcaggatcaccaaagaaacagtcatcatctgctgctatacataaaccctaccttcattttacaatgtcaccatatcatcagccaacctcttacaggccacgcttattgctctctggagaacggggctcaggtcaaacttctcaccttgctccagcacttttgcacactctagaaagattctctgtgcatagactagatctcccagcactttattcagttagtgccaaaacacctgaggaatcatgtgcacagatttttcgtgaagctcgaagaacagtacctagtattgtttacatgcctcacattggggattggtgggaagctgtcagtgaaactgtgagagcaacttttctgacattgctacaagatataccatcattttcacctatatttttattgtctacctctgaaaccatgtacagtgaactgcctgaagaggttaaatgtatctttagaatacagtatgaagaggtcttgtatattcaaaggcctattgaagaagacagaagaaaattttttcaagaattgattctcaatcaggcatcaatggctccaccacgaaggaaacatgctgctctttgtgctatggaagtgcttcctcttgcactaccttctccacctcgtcaattatcagaatcagaaaaaagtcgaatggaggaccaggaggaaaatactttaagagagttgcggttgtttctcagggatgtaaccaagaggctggccacagataaacgctttaacatcttcagcaaaccggtggatattgaagaggtttcagattatcttgaagtaatcaaggaaccaatggacttatcaacagtaataactaaaattgataaacataattacctgactgcaaaggatttcctgaaagatattgacctcatctgtagcaatgctttagagtataatccagataaggacccaggagataaaataattaggcacagggcttgtaccctgaaggacactgcacatgctatcattgcagctgaattagatccagaatttaataaactttgtgaggaaattaaggaagcaagaataaaaagaggcttatcagtaacatcagaacaaataaatcctcatagtactggagctcggaagacagaaactagagtcgaagaggcatttcggcacaaacaaagaaatccaatggatgtgtggcacaactctgcaaataaatgtgcatttcgggttcggagaaaatcaaggcggagatcacagtggggtaaaggaattattaagaaaaggaaagttaataatttaaaaaaagatgaagaagacaccaaatttgcagactatgagaaccatacggaggacaggaaattattagagaatggagagtttgaggtaagcactgactgccatgaggaaaatggagaagagactggagacttatctatgaccaatgatgaatcatcctgtgacatcatggacttggaccaggggcagaggcttaacaatggagcaggcacaaaagagaactttgcatctactgaggaggaaagttcaaatgaatctctactggtcaacagcagcagttccttaaacccggagcagacctccaggaaagagactttccttaaaggaaattgtctaaatggtgaggcttccactgacagttttgaaggaataccagttctggaatgtcagaatggcaagcttgaagtagtttctttctgtgatagtggagataaatgtagttctgaacaaaagattcttctggaggaccagtcaaaagaaaaaccagaaacttcgactgaaaatcatggagatgatcttgagaaactagaggcactggaatgtagcaataatgagaagttagaacctggctctgatgtggaggttaaagatgcagaactggataaagaaggtgcttctaaagtaaagaaataccgtaaattaattttagagcaggcaaaaacgacaagcctggaactggttccagaagagccatctgagcctgtgcctcctcttatagttgatcgtgagagattgaagaaattgcttgatttgttggtggataaaagcaacaatctggcagttgatcagcttgagagattatattctcttcttagtcagtgtatctaccgtcatcgtaaagattatgacaaatcacaacttgtagaggagatggaaagaacagttcatatgtttgagacattcctatgaacttttcaagatgagtggtttatcctctccaatctgctcctcacagagcagtcttctgagccattcaatttcaaattgcaccaattatgtgcagagccttggtgtaaagtgctctctcactcattctttctctctgttgaatttggtgctattgtctcaggtacctgaaaccaaccagcctacaagaaccaaacagaacttcagaaacatgttgtattttccacaaataaaaaatacaaccccacagcttggagattttggtgctacagaaactgctctcgcttctgctcctctttttgtgcactctcttttggagactcctctcttagggagcagaccagcaaacaggaggaaactggatgggggcagttctaactgtgttgaattgtttaaacagtgggcaacttgttatttttttttcctccattttacccctttaatcatatttttcccccatctgggtaatggactgaaacctgttttagagttggctatggtctgttctggtgggaagctgaagaaactggatgaaattaggtcaggctctttagaactgcctttaacgtgcctttttattcatttgaggaagataaggctaaaaggatgggctgtttgaagcaaataaattagaaatatttctttggtcacaaccttgaaaataagttttgatactctatgtcattaagagacaaccagtgtttgggtatgaaatgcctgtcttattctcaaagctcaatcaagacacccagtaagccacataatatactaaaatggtaagttttcttgtaaggtctgttttggtttaagaaacatgaataacaacaaagaataatacacagtccacacacaaaaaaacaaaaaacaaaactgcacacgttttggtattgccaacaatgatgactagaaaataaatagatagtggccattttttcttctgtcagtggcaatttaatagttattcatgtttgagttcccagagaaaaatggttttcatatgtagtaaattgttgttttgttttaaagccaggacttgccaaatggacagaaaagagaggaattcatcagaagctccataaaattcattttctgtatgcttaattgcaaacgagctctggtatggtccttgaataacagtattaatgtttaaatcccatctcctaagcttaccttcacaactcttctttttgattggaaaccattttgaatcttgttgagtgatttctgtgaattgtatgtatctgaaattaattatgggttactagttttacaaaaactttctacaaatttggagacacagtctaggcagttgcaatgaggcaaaggatgcagtgactttttttatcagatgatttttaaacaaaaagaaaattttgccagcaagttggcttggtatcttcattcattgtagccgttagctgcaggtgtgtctttccaatatatgcaacacatgtagtttgggttttaattagggcgaatggtcttggactactgcagagattctgagctacctcagctttttgtattttagttaccaacagtgtttacagagtcttgtaatcactttgccaccgtttacatcctgaagctaaggtacttgtctccttgtctttggctctttgtagtgtgcagaaagcatactttggccatagcctactgcagtaatccaaagtgcttctttgcatttacatttacatctaacgccttctaattctagcttaatttttttttaaatgccacgtgttttctttgtacctagtctgtgaagtttctgtaatatccagttagtcatacaagtcaagatgctacccatgtagacacactgtatttttaaggtgggcaagtgcgattaacgatgaaccattttaaaggggaggttatttgaaacctctaatttgattattgggaggattttcatgctttctttagtatttattaccatcataccgattcaaactattttattgtctaatacattagcattttgtattttgatggaaattgttacagaatttaaagatttgatgaaataagatgtagcagattttttgtagcaagtttctggtaaaagggttttttgcaagtctcaggttcttgctgcactatttttttttaaatatttattccagttattctaattcagaagcattcttttcaagtaacagcagcacttgtgaaaggaaaaaaaaatgcacatgtttcttagtaggttactaaatttgtacaattaattaagattttagccatcagtgagtttgaaaagggaaatgtatttattttcagcattaaaatgcttccaaaagatcaagttgcttttgtttgtttgtttttttaaccgtaatgtagatggagaaattggaggcaacctcagtataggaactgccactttgaacagtttaggtcttaaagagaaagtcaatctaatgccaaggggagaacaatgagctgaaattgtaccaactcctctggccctccttccctcaattaaaaaaacacacttaccagttttgcttattttacagatatctggtggttctatagtttaaagcagcttgtgaaattaaaaaagtggactcaattttgtttacctttctgtaagtttttcatttttgctgtatagcattggcaaaaatatgtacaaattgacctctgttcttatttcctattgtgagcattataaagataagctcctatgtaaaaccttgctctcagatgagtaaaatatgtatcacagcatagctcagcaataattcatgctcagctgtggggaccctgggggctttttgaagatgatggaaccgcactagggttgaaactgatggctgtggagttaattgtgttttcgagcttgaatctcacctgtgattttttttttttaatgttgtttcatgacttgatttttctcataagccaatgtatttgtaggtttactggattttatttttagggagtgggtaatttcttcccttttttgattaagttggttcagctatggtgctattcagtaggtatcttcagtgtcaggtcccgtagctgaatgccattgttattataattattatttgtaatcacattgtaagcttgaatttgggcttgtacctgcatcttttgtattctgtacatctggttacttagactttgggagtccaatttggtttcagtcatgtatgtctactttgtagtttaagtagacttcatcaactatggtctattttgggtttgtagttttaatttagaattgtgttaaattgatgttttgcatttgacttcatttgacattagttgaagtaaattatttaatttttgaattctggaatttgaacatttactgtaatttgtaatataactgctgtgaaatacttgaataaagatgacaag

SEQ ID NO: 301 - DNA, 2242 bp, Homo Sapiens
atgttgtgagaaagtgctgggctagctgactcggatcatctcctagagtttaggagaaataacaatcacaaagtttgaatttgcaaaacctttaggctttgctggcaggagagaaaataccacttttggatcataaaatggatatggaatacatgggctcaggtaaactgggccaaatattgaagcagatttggagacaaaaccagatgctaaagcaggcactcttgggtgatgacctttgtgagggggctggtggggccacttggatggccactgtggtctttctgggtcaggaactcagcagtgcccttcaccagctgctggagcacacctcaggcaccctgcgttccacctgccagcagctgcatgtgctgcttgacaaagagaatcaatgtgtctcgagaaaaggtatcttgatgtgctgagtgatgttactggcccccaagtgtcttgttatattacagcaccatcatatgttctacaacaactagaatgccggataataaatcacatgagttctttaatagtgggtgataatgaagagttagttagcaacgtcataactattgaatgctcagataaggaaaagagagttccatttccaataggcattgcaattccatttactgcacgttacagaggaaattacagagatatcatggtgaaagtgtgtgacataaaccttcaatcaagttacctaaacccaaattcactagaaggaatgaagggaggttataaggggacctgtgcttcagtaaaagtttacaaattgggtatcttttctgttgtgtcttgtttaaagaaagagtcgttcacagtaacaaagaaaggcctcgctcttaagtcaagcatggattcccgaatatccttaaattaccctccaggagtttttacctctccagtgctggtgcagttaaagatccaaccagttgacccagctctggtggcacatttaaaagcacagcaagatactttctactcagtccaatccacaagccctctgattcacattcagcacccatcaacttatccttttcagaagccagtcactttgtttttaccttgttctccataccttgataaaaacaaccttggttctgagatagatcataaaagaagagcaagtgccacaataaataggattacaccttcgtatttcaaccggacaaaaattgcctccataagaaaacctaggaaaaatgccagtgaatgtttgaaattactgggattcagaagccaagacagtggttggtgtgggcttgatgatgttgtgaaaaccatacagagcggcttggtatcagttgaattgtatgaacatttggagaggtttattgtacttcacctctcttccaccatggacaatagtcatttggttacttttgtgaaatctttagaggaagccatgctcagcaccactgcctgcatagtactgtctcaccagaaggacaatccacatagaatagctgttttagtggtgccttccaaagatttaagccaggtgcttaaggacctgcacttggaagggtttggaggacctccagagccatctcgtcatttccaagttcgagaaggagaacaacttcttttaagatttactggaaacatatttgcttcaagcaacgggaaggattatggaaaagactacacacttatttttcacttgcaaagaaaacctaggctggaactccaaatcaaagaagtggacgaatttggaaactatagttgccctcattacaaaggcaccattgtcgtttataaagtacctaaaggaaagatagtccccaacttgaatcaatctctcgtaattaatgaaaaccattctcagttgccaatttgcaaattaccattgaaattgccaaagcataagaaattaatcaaccgtccacagagtaccaaaagagtttctaaggatcctgtagaagccctttgggataacttgctccattggctggctgaggagctctcagaagaaaatgctgagtctctttcctcaactctccctctgcgccgtagcaccattcagctcatcaaactcaagaaccctgatgatctcacagaacagatccacgagtttctttgcttctggaaaaaatcgcttccaactttcaccgacaaacttcgcctcctggctcgacatctccgcaagattggcaggagtgatcttgcagaagagctcaaattcaagtgggaaaataaagtgttcactgaaccacagcagtgttttgatgtagcccctgagtaa

SEQ ID NO: 302 - DNA, 10066 bp, Homo Sapiens
atggggcatgccagtgggtcacatttcctctctgaatctccctccaagccgcactgtactcttgaagggaaagggacaaggcttcacaagaaacagcacatgctttcctttcatttctggaagtcccggggtcaacctacagatgctgcttcttccgtggccgatggcattcagactcctcgctgctgccgacggtgccaggcaaacaactggacaggacagctcagctacagaacactggccacagtctcggccggagcagcagccccccagccacagaccacctccaccgcctcatccaggagccttcccacctccctcaggcttgctgcggccccgccacaggggctgaagaactgggaggtggtggcagcagtggcagcagtgcctacagccttggggccagtccagatacgtgggaccctgcttcgggcaactctgcagcccctccggggccagagacggacccaagacttccccagcgatcaccattgtctcttcctgtcgctgaaacctgggcaagggctcataatggaagctgcccctcctgagctgaattcgaaagcaagacaggcggaggtgggggacggggtgagcagtgctcaagacagccaggagctcaagcagcagctgtggccacttcccaagccttcagcctcctcccagcgagaagcgaaatatgtggacatgtgtgcttcagctgaagtccagagggagagtccccagaccatgaaacttaccctggggcactgccctgggggtcagagggcctctaggagcccaaaggagaaagcccaagatgaacccagcagcaagactccaagcccccagaacaatcctgcctcctcccaactctctagatcccagcactctgcctctgaagagggtggcaatttctcatcttcctcatcctcctccccgatgaacaaagcagaagaggatggcctttccaaaatggaggactccaccacatccacaggggctctggccacctcctcttcatccttaggcttcgagagtgagagtggtgaaagtgaaggttgccaggccggcagcagggacccccccaaagtcgaagaggctcactacatcaccacccatgagatccagctgagtgaggtggaacaggacatggatttcgacgtgggactggcctcccgctgggatttcgaggacaacaacgtgatctactcgttcgtggattatgcttcctttggtggcagcgacgagaccccaggggacatcaccagtctgaccgaagaggacgacgacaacagctgctacctcagcaccactcccagcaccaacaccacccggacgcccagccctacaagcagcgacctggcccgccccaatgcaggccgcagtggccgcgacaccagcagcaccgaagtgggcagtggcccctctgacagtggccccactcccccacccactgggcctggcactgcccccctgactgagcccttgcctgagaccccggaggcagcttcaggggcagcagccgccgccgcaagcagctgtgggagtgcagcaagccagatcctcctatcaatcaaaccggcttcccgggctataaatgagcctagcaacgtgcgtgcaaagcaaaacattatttatgctgccaagcatgaaggcgacatgagcctccgcgtctctacagctgctgaacacaattcaagttcgctgaagcaaaacccggctgcagcagtggctcaggaccatgcaaagaaattcattgctgtacctgctcgcctgcaaaccaggtgcggggccatccgggcgaaggagctggtggactactccagcggagcctccagtgccgtgagcgaactggacgatgcggacaaagaggtgcgtaacctgacctcccgggccttccggagcctggcttacccctactttgaggctctgaacatcagctcccgggagtcctccaccacgctctccgaagtgggctttgggcgctggtcaactttcctggacttaaaatgtgggggtgttggggccagggtggagcagagcctcctcaggagcagcgcggcctctgtggctgcaggtctgaggaagggcagtggggcccgggccactgccgaccagctctacatccagtccaagaagtctcagaccaaggccttggagttcgtggtcagcaaagtcgagggggaaatcaaacatgtggagacgcccctgtgtttccagaagcaggtccagacgggctcccgcgtcgtcacccttttggagcccctgaatgtacgcagtgagagcaaagccagctcggcccctgggcccggcagggccaccaaaggccccggcaagggtcccgggtcggcatacacggacgacggctccgagacctccgagggcagcaagcccacctcccgcgccgatggcccccagaagtccaagttcgcctccagtctgctcaaaaatgtcatttccaagaagatgcagcgggaacacgagttcaaaatggagaggggagaagtcatggatacatcccaccacctctcaggcacctccaaggagacggagggcgcccgcgggagcgagaggcagcgagagaggggcctgcagaggcagagctctcgtcactccgaggccggctccgagtacacagtggtcagcatgtccgacgcgggcggggaggggtccgtggcgggctccaaatctccagtcttcaaagccagtactcctcgcgagcgcaacgcaggccctggccggaatttcaccgatggacacacagaagtgtgtgaaattaaaaagagtgcctcagagaccgtcaagggcatcttcctccgtagtcagaacagtgcgttccggtcatggaaggagaaagaggccgagaagagggaggaacaagcccctatagggaagctgaagctgcccaaaggaggcgactggcgggctgatctcggggagatttctgccagcaagaacaccatcatgtctcgcctctttgtccccaacatccagcagacacccaaggacaagcagccgaggaagcaggccaccaagtaccctgctgctcaggccacctccacagcggtgatcagacccaaggctcccgaaatcaagatccggctggggagtgtgcagcagccgagctcagacttcaacattgccaagttgctcacgcccaagctggccggtggcagcgcctctaacctgttcaagaccatcgaggacaacagcagggcacagcagaaactcttccgcggggacaacctagaaaaagtgccccatttccaggtgagagacatcagagacaagtccaaggctcaaggccccctccaccaggtgagagatgtcaggaaactaattaaagggtcaggggatagtagtgacaagggcagtgttaccccagagcaggggctgactggacccaaacccaggcagctgtctgcagcagctggcggatctggatccctgtcccccatggtgattacatgccaggctgtagtgaaccagagggaagacagcatggaccgagagcccagggaaagcatgggcaaagggggcggcagcagagtcttgaattcttcctccccagaagggacagtcttggttcacagggcatctggcaggctgcctgtggctaccattgcccccaataagcccgagcagggctcatacctgcctgtgctcaagattgtctccaaggcttccacccagaagaccccagagaagctcaaggaggaggaggtcaaggaggaagggaaagccacgaagccagcccggaatgccctggagaagctgactgcagccgtgaggtccatggaagagctgtacagcttcaacaggaacgagtggaagcgcaaaagcgaccccttgcctatgatgatggacagccacgtgctgtcgctcattgccagtgaggagagggaaggggtagtggttgctgatggagaccacgacaagctgtccaaacggctgggtgaggtggaagagcggggcacaggaaacaaagctggtgtggtcctgcgaggggcccccatagaacgtctgcagcggagaaactccaaccccagcgctgagagtgtgtctgccagggcagcggcctttgagaacctggccagggaaagaccccgatctctctatattcccccagtccacaaggatgtagagagaacccaacccctgcagcccctcccaccactccccagcaaccggaacgtgttcacagtgagtgccagcagcatccagaaaactgggggtgtcgctggcaagttcccacaagggccttctccggagagtccttcagcagctaagggcatcaagtcgcagggactccggtccctcaagatctctccagccacccgggcacctcctgatgaggtgaccaacaggaaaagtggcagcaatttggagaagagcaacagtgactgtgagaattacctgaccatccctcttaaaggaagctctgctgcaggggagcttcttagcaggcctggggcttccagggaggggccccccaactcctcagctgccactctctgtagtttacccccgctgagtgcccgcagtcaggtccccagtagctccaaaggctctcaggttagtggaaccagccgaccagcttggcgtaccaaacctgacaacccccgggagacagtagctgcccccccagggccacagagccccgagcatccccccaccaccatctaccaccagccgccgctgcccttcaccctacagggggcccagcctcaggtcctctgcttctccccacccagcatgcctgccccagcacctgcagcctcagctcccgtccccacagaccccttccagcaggcacagcctcaacagacccagcgtaagatgctcctggatgtgacaacaggccagtactatctggtggacacaccagtacagcccatgacccggagactgtttgaccctgagacagggcagtatgtggatgtgcccatgacctcccagcagcaggctgtggctcccatgtccatctctgtgcctcccttggccctgagtcctggggcttatggacccacctacatgatttaccctgggtttctgcctaccgtgctgcccaccaatgctctgcagcccacaccaattgctcgcgctccaagaggaagtgagctctccccaatggtggcagaaccttccagcaaagaggcagctgcaacgttcaccgaggccccatacttcatggcttctggtcagtctccggcctcctcaacctcctcagccccagcagccacatcccagctcctaggggccaaggcctttgcccagctgcatggcaagcctgtcatcagcattacttcgcagcccctggggccacggatcattgctcccccttcctttgatggcaccaccatgagctttgtggtagaacacagatgatgagcagccaccaggaagcggaatgaaaaactgctggagcaagacaaaaagatggactattcttctttaatctggaatttgcattgtaatagcactaagaattatttcatctgaaaaacttcttccacatgtgttattcttaatttttgcttcttataagctaagtgtgtaagtttctatatttttctgaacaatcctcttaaggcagtttttattttaattttattaagttgattgaatggttgcattttttccctttatgactatttctttttatacttcaacacaggatataagctttctattcacctccttcccccctgtacttgtgactagacaaacaattcctttgttcccattgttcagtcaaaacataccacagaatgggattgattctgttgtaaaccaagctagtaaatgagtaatttggatcacgaatctccttatagtttcttggaatatatcaagactagctggctgagttgtaatacgtatttaagttttcactatgatggtctgctctttgaatcatatatcagccaaacctacccattctcttggttatgctctatatgttcttttattaggtttggcatgatttcaaatgtgattgtgaaaaatggtggttgtaatgtttgtgctttattttatttttcccatttgtacaatgccacgacactatttgttgccttaaaatagaatggcttgaaatactggaaagccaatgattgcatctaaaattaagtacttagtctcagaaaggtataaaatatctattttcctttaagaatccaattatttttgtgggtgcataacatttttcttttcttcaataattccctccatagttgcatactcgtgtctctcatggattgtttagagtctaaagagtgacccatttggggcagtagagtagaatatggcactaattcagtggctctgattcactccagccctagcctcgctatcccaataacagtaacctagagttacagcacttgctccttatgaggatgaggcaggtttgaagagatgtcaagaatccaaatcacagaatcttttattgacatttagtactgtctcagttgtaacccaattctgaaggctatttgagtgagtgttcacagggagtcttgaagactggaagacttgattgaacagataaatatttagcttgtcataataagtgtatcgatatatacttggcaaatgttacattgaaatattacttaattactttttaaaggaataatttgaaggttttcccaggatttttttttaagaatctccttttatttaccaatttgtttaaagataaagcattctggtaattttttaaacaccctaatattattttaaacctcagcaatatttgatttctgcttaaattttcttcataagccacagaattttatgctactcatgacaaaaagtgtgagtaaaaaactaggagactgagttttgtatgatttatataatctttttactttgtagttatgcttcccatctcagactcttaaaaaagacttaatttcactttcagggccttcctttaagggatcttactctgaaaaaaagttctcttgggtatagggaaaggtttgaggcgggaatagtcagctctgatcacgattcaattgcttgttgtgctgatgagctatgaaatgaagctatagactttatgagacatgaaatatgaaacatagtctctgtgtataaaaaagatgcccttgtgccaaattcaagaaaaagatatttctttatcatagaggtcttcttacccaggcacatcaatcaattccccccagaacttaaagtaagttttatccactggggaacaaatcttatggcatcagagcttcctcgttttcaggagagattggctgggtataaggtaacttaatattgacccaagaaagtagaatccctttcagaaatcttacacttattttactgaaagcagcaccaagaaacctccagtatttgaatacacctggtgaaacctatataggatttgggtggatagtaccaaaattgttaagactggtttaaagccaaatgcgactttcaggaaaaaccagtggccatgttgagtagtgactgctcaccaactcttccaaaagagagacaactccttctctagaaaatgtggtagagttgagggcttgggacccctaatctatgtatcagtgtttctcaccagcagatttgagttttaaattctcacactgaggtaaattaggacacaaactaaggaaagaaagaaaaagcttttcatttgtttgttctatacaagaggcttcaccttttaggaagttgccaaggacacagtgatgtccaagtggctaaaaacgcaacttttaaataatgttctattaatatcatgtcatctatcgataattttatggttctctatttcaccaaatcatacaaagctgctaggccattcactacctccagtgatagggaaaaaatattttcacgggcatgaggtaaatctcaatcttgatttttattgttttgtcatttcttgaggttgcatgaatatttgaatgaagtgatatacccttccttttatagctcaaggggaatcaaacaagagcctatgaagccttctgacccataaaactattaccctaataatgtccctttagttactgaacttcccttttattttttattactataaaaccattagtaaaacatttcctaaatagtgccttgaacttgaatctaatcagaattgcagagtctggcttttataatatcctcttagggttatatgtgtggcttagttttccagaagatccactttttacttgttgataaaatggtcatatttgaaatatgtcccatttcaatcatttctggaaaactgaacacatgtgtaaccgtataaaaatttaattcgccagaatgtatgtttttaaaaagtactcaatgaagttgccctcaggattaagtgaaggcccagatatgtaggtaatgacatagcagagaggctctctatatgtccatttatcagggagtaaataagctaaagcaaatcacactttatatctttataacaaatctcaactattgacatgcatttctaatacatccttatgtcactggaaatatctggtgatataaattcctttttcttattttcaaatttgacattatcatccttgcctcttaaaaagatagattttaattgttttcatacttcatagaaatcaaagtctgtgtttgctacaaattgaatgctcacgttacctgaaataatactttggactgcaggacaggacagtattgattcctaagtagattgactataatctcatgataagtatgtatatgtgcatgggaaaacaacattcaataatagtctttgtgtttaaaactatcatggtatacattttcttatgtggtgcttgaggagtttcattctacagtttacaaggtgtaggtttgcaccccaaattctcagggtatgctatttcacccaaatacttgaaagaaaaaggtgccctgtattttatcagtactgttgagggggaaattttttgtgtaagtttgtttgataaaactgcttataaaaatcaaattcacaaaatatgttaggctttcacataatttctaaggagatatatgtagaaataagatatatattatcaagagactgcttatatattcttaactagcttctgggtcctaagtagacctcacaggtgcataaaatcattaataaagcatgtagcacttgctaattggtgccttaagcttgaatctaatcagaattgcagactcgggtcctctgggaaaaaaacatgtccgtctgtggcacgtgtgagtactaggcccaggggaagagtctgaaaattgaattcttttgtgtgtcctgtgtctcagaagagaactgaatgttcagagcagcgtttgtaagctattaacattcagtatttcgtgttgcaactagaacacattattagatttattcctgtttaattcataatggtgcagaataaaacacacacatctgatttgatttctttttctttttttaagtttcataattgctttttatggctagtgttaatggcaaaaagtcctttccagggctccctgaataatctaccatacctgtatccatagcaggtgatgcttttttttatccccactttgaagacgtgtgtttctgtatttacacataaatcatactattgtatattaaagacagcagtggttgaaaagaatgtgaacactgtagaagttatgttggaaaaaaggagagtaaattgtgtgattaatggggaaggatattggataatgttataccccggactatgaaaaaagctggtggtaaatgggaagaatgtgaaattttaaactgctctcaacgtaggaatcttggtggaaaagttcctacctgaggtctgatatgattcaattatagaatgcaatgagcttggccaaggggactttgaatccagccaaggaaactttgaatctcgacagctctgagaatcacattttcagtgcattgaatatggagtaaactatttagacaaggattctgtgagactaggctacttacctttaattgccagcatttgtaaatgattgtgcaatcttgtgtaatggtcttttattttgactgttttggaaaaaaaatgttttattgtttttttttcccagtaaaaattacttc

SEQ ID NO: 303 - DNA, 1668 bp, Homo Sapiens
atggagtttcaagcaaggttggaacctaaagagagtattttagaagctgaagagcggggacgactggagacaataatggatgccatttttaccacaagcagctgtggaatgcaggatagggtaggaggtgggccaggggcttgctgtggcctccgttctgaaaccgatcccaacacgcccgcgtcctgctccagtcccttccccttggccctggagcgaggtgagtcttcaatggaggtgttgatcgtgcctggcacccggcgcgcgcgacctccggccgctggcgtcagggaaggcggcccagggcacaggtggcgggcgtcgggggcgaggcgcgcggtggcgcagccaggaaatcccgagcccactgggcgcccccctcgggagcgcgggcacgtgtgcagcagtttactgcgcgcccccgagggccggggcttccccttccccgcccccttggctttcgcagtcaaatcccgctctccgcccgccgcccgcggaagtctcaccgcgcagcagcacccccagcccgggcggttccggggaccgaagggcgcggcacgtagggggcccgtaggatccaaactgcggaggagaagcaggaggagggaggaggaagaagacaaaggagcagcttctagttgcagctcaagacccgcgagttcaccctccgcgccaagcacccaactcccggctctgcctacagtcacccacagacctaatgatcgactaagcgccgtaatggcccgagatgacaccaggagactcccttgctgtgcgcctccggaagacgcggaacgtagcccctttctcacactcctgggacacaaaaatacccgacaactcaaagtcgccaaaccacatcttttcatgctttgaagacttctgcccaaggctgtggcaggagtatgtccaactgtgatttgggattctttttaaacatcgaatcaaagggaagaggggagggattcgcaactaaatggtagttgttttcaagcaagtctttacgtagccccaaacctactctagtattcggtgattcagccccaaaacatctctgcctgcctttatgttcggatctcactccattatttgtcagcaccaagtactaaacccacaaagcgatcgctgtacgggacaccaaacccatacctgcccgtcccctaccttccaggcaaccagtgtcaatctcctcactatacataattcccaacatccctgcccgaagtgaggagaacggtaatttaaataatacagcgggggaggagaggacacactgtttttgaaagactgtaagcattctgctgttccactctgcgtccttacacttgctgagcactgacaccaaatttaaatggcgttccttcaaaactgatgtaattgtaaagagctgtaaagggcaatgacctcaagtggatgttttttcccaggtaccctacaaggtttgcacaaagcaagaaagcatcatgtaaccgaaatgctgaaaagtatagatgctgcaaaacctcattctgagactgagaactatgaatagtcagtgtatttccttctgcggtgcagaaaaagaacaaccaaaaagaaagcaacaaggggagatgttatttattttaatgacaccaaaactaccaatcctagcaatttaataaattaaaatcatagtcctttaaatgt

SEQ ID NO: 304 - DNA, 954 bp, Homo Sapiens
atgaccgtgactgaggggactggtgacaatgtccagtgctatggagagctgcagaatattaagaaatgggaacaagctgttgtgtttgccagcttgtccctgggagtgtgggcggcccctttcttgagcgcagaaacacttacttttccccctaccctgctcctcctcctccacagccgtctttctctttgcctcagccacttccttccttggcctcaccctccccagtgcactgaagaaggtaaccgggtccagacccacgcggcgccagttctccggcgggaaggaaaaccgcgcagagaggcagcaatgaatgtggatcacgaggttaacctcttagtggaggaaattcatcgtttgggttcaaaaaatgctgatggaaagttaagcgtgaaatttggggtcctcttccgtgatgataaatgtgccaacctctttgaagcattggtaggaactcttaaagctgcaaaacgaaggaagattgtaacatatccaggagagctgcttctgcaaggtgttcatgatgatgttgacattatattactgcaagattaatgtggtttacatatctttatgtactgccattttttgtttctggtaaactggaatataaagtgaaagaacaaacatttgaacatacttaatgtatttttatagaactttgtaaacgaaaggagattcatgttttagaagtctgtccttttttatatcttgaaagaaaatctatgtatgatgctataaaataaatcctattatttttctcaggaatctggttaggaattgcaggcaatgagattttttgcggggcagggatgggaatgtttgttcataaataattagacattttctatagatatttgacattctgcgaaagcaacaagcaaactgaagaccaactcctatgagaaatattatgatgtttatgtaataaagacatgtaactgtcttaaattt

SEQ ID NO: 305 - DNA, 4008 bp, Homo Sapiens
agacttacatatatatgccaggcacagttttgttgttaggaatataaagatgggaaaatcttgattcgtgtgtaggggtggggatggcaaaagatactccaaaagataatttcaaaacaggtagtaaatgctatgatagagtctaggtaactgctcttgttatctggaacctacttaaaccatggatggtgtcttagactgcttctattgctgtaaaggaatacctaagctggttaatttaaaaagaaaagaggcttatttggctcatagttctgtagattatataaaaagaatggctccagcatctacttctggtgacggcttcaagttgcttccattcatggtggaaggtgaaagagagctggcacgtgcagagattacatggcaagagaagaagaaagcgagaatggagagggggaccaggctctttttaacaaccggctttagcctggagcggtagctcacacctgtaatcccagcactttgggaggccgaggcggatggatcacgaggtcaagagattgagaccatcctggccaacatggtggaacccatctctactaaaaatacaaaaattagccgagagtggtggcgggtgcctgtagtcccagctactcaggaggctgaggcaggagaatcgctttatcccgggaggcggagggtgcagtgagccaagattgtgctaatgcactccaacctggcgacagagtgagactccacctcaaccaaagtaaataaataaatgaataaatcagctcttgcaggaactaatagagtgagaaccttactatgggggacaataccaagccattcatgagggattcaccgccgtgatccaaagcttcccattaggcccacctccaacattgggaattgaatttcaacaagaggtttgggaaggcaaacattcaaactattgagaatgcaatgcctgtggcgtttctgtggtcatgaggtggcaaggaatgtttggttgcctttacttcctggagctgaagattcagttggtatgacttcaaaaacataccacatatgtggatttctagaccagtgctatgcaatataacttttgtggatatttttgatgtatacattgctcggtacagtagccactaaccacattagctattgagcactgaaatgtgactattgcaattgaagaattaagtcttttatttaattttaatttaaatagctacatgtggggaatggctaccatattggagagtgtagttctagaatatcaagtggttgctatagacacaagctgacttcttcgtagctcctctctcttccctcagagccactgtctcaagactctgcccttcttcaagagaagagcccagaagaagagagaatgactgctaggccctttatggctggattcaggccatgtaaggcatgcctgcttccccttcaccttccaccatgattgtaagtttcctgaggcctccccaggtgtgcttcctgtacagcctgtggaatgttaccaaagacgttggaagaggtggctatggacatcacctgggagaagtggaagcaaatggacactgttcagaagtccatatacagaaacatgttggaaaaatatagaaacctggttttgctagatgggaagcttgaacgtggggccaagacatcaagagtagagcagcaggacatttcaaaagaagattaatctcaaagattagagatggaagaacttgcaaagagaaagtctgtaccggaagaaatctggaaatctagaggccagtttaagaatcagcagctaaacaaggagaataatctagggcaagagatagctacctgcacaaaaattcctaccagaaaaagagacatagaatctaatgaatttgtgaaaaattttactgtaagatcaatacttgttgcagaacagatagatcctatggaagagaattgtcataaatatggtacatgttgaaagatgctcaaacaaaactcagatttaattatacaaagaaagtatgatggaaaaaaaaaaaccttgtaaatatagtgaatgtgggagaaccttcagaggccacatcactcttgttcagcatcaaataactcattgtggagagagaccctgtaaatgtactgagtgtagaaagggatttaatcagagttcccacttaagaaataatcagaaaactctttcaggagaaaagccctacaaatgcagtgagtgtgggaaggccttcagttattgcttagttcttaatcaacaccagagaattcacagtggagagaaaccttatgagggtactgaatgtggcaagacattcagtcgtagtacataccttactcagcatcaaagaattcacactggtgagaagccctatacatgtcttgaatgtggaaaggcttttagtcagaacacacatcttactctacatcagagaatccatactggagagaaaccttatgaatgcaatgaatgtggtaggtcctttagtcagagtgcacatcttactcaacatcaaagaatgtatacaggagaaaaactctatgaatgtaatgaatgtgagaaagccttccatgatcactcagctcttattcaacatcatattgtccatactgcagagaaaccctatgaatatcatgactgggaaaactttcagttactgttcagacctcattcaacatcagagaatgcacactggagagaaaccatacaaatgcaatgaatgtgggaatgcctttagtgattgttcatcccttattcagcatcaaagaactcacaccggagaagagccttatgaatgtaagcaatgtggaaaagcctttagcagaagcacataccttactcaacatcagagaagtcacgcaggagagaaacagtataaatgcaatgaatgtgagaaaactttcagcctgagttcattccttacacagcatatgagggttcagactggagaaaaaccctacaaatataatgaatatggaaaagcttttagtgactgctcaggacattttcagagaactcacactggagagaagccctgtgaatgtaatgactgtgggaaacctttcagtttctgttcagccctaattcaacataagagaattcataccagaaagaagccctgactgtaccttcataccagtaaatgcactgactgtggaaaagccttcagtgattggttagcacttgttcaacatcagataactcaacactggagaaaaaccgtataaatgtactgaatgtggaaaagccttcagttggagtacagacctcaaaaatcaccagaaaactcatactagtgaaaaatcctataaatgtaatgaatgtagaaaggcctttagttactgctctggtcttattcaatgtcaggtcattcatactatagaaaaaccttatgaatacggtaaatgtggcaaagcctttaggcagaggacagaccttaaaaaacatcagaaaatgcataccgaagagaaaccctatgaatgtaatgaatgtgggaaagcctttagccagagcacatatcttacaaaacaccaaaaaattcatagtgaagagaaatcaaatatacatactgagtgtggggaaaccattagacaaaactcttcttttttacaacaataaaaacctcacactggagagattctctgaatgccttaagaatttggttaatatggagacccttcccagggaaacagaaggaggatcgtgaaaactgttgactacttagaatgatcacatggtttagtggagagagcatgattctgggttttaaaagtcatggatctcaatctcagctcctattactaactagatcttttactttggggtaagtcacttcatatctttaggccttaatttcctcatctgaaaaactggaaggcctgacttgttgagctttaagatcctcaattattatatttactaggaattcaagtttctatagatgtggttcagaattgtgacttatttattgtacatcaggtgtgattcacaagtgagcttgtagtagttattaaggagtcaataaagatatgatatag

SEQ ID NO: 306 - DNA, 3726 bp, Homo Sapiens
atgaagcagctccaggctagcagattctaccctgtctgggcagtgccctctgttctgagcctccacgggtccagttctccctctatgtccaagccctatctgctggtggactggagaccaactggatctgccccttcttcttttggatgtgcctctcctctccctcctgcagatgctccatgctgcaagctgcaaggagagcccaggaggggtgtcctcctggtggaagttgcgcttgttgaagatgatttatataaagaacgaacgagaaaaagaaggaaatcagatcgagaccagcggttccgagcatttccctccatggagcagagtgctcttaaggaatatgaaaaattggaatcacggaccagaagggttttgagcaacacttatcagaaacttattcagtctgtcttcctggatgacagcatccctaatggagtcaagtatctcataaataggcttcttgccttgattgaaaagccgacagtggacccaatctacattgcattatttggaagcactggggctgggaagagctccctgatcaatgccatcatccagcaagcaatgtttctaccagtgtctggagaaagcatatgtacttcctgcattgtacaagtgagctctggctgctgtgtgcagtatgaggccaaaatccaccttctgtctgaccaggagtggagggaggagctgaagaacctgaccaaactcctgcataggacggaggagctgagcagagaagaggcagatgcgtggaacagggatgaggcagtggaggaagccacctggaagctacaaatgatttatggaaatggggcagagagtaagaactatgaggagttactgagggcgaagcccaaaaggaagatccccacctccagagtcatcaccctcaaggcggaagaggcagaagagctgtccatcaagctggacccctacatccgcacacagaggagagattgggatggagaggccgctgagatgcgcatctggcccttgatcaaacatgtggaagtgacacttcccaaatccgacctgatcccagaaggggtcgtgctggtggacatcccaggcacaggcgacttcaacagcaagagggacgagatgtggaaaaagaccattgacaagtgctcagtgatctgggtgatcagcgacatagagcgagtttctggggggcaagcccacgaagaccttctgaatgagagcatcaaagcctgccagcggggcttctgtagggacgtggccctggtggtcaccaagatggacaaactccacttgccagaatacctaagggaaagaaaggcaggaaatcaagctattcagagtcagcgagaggctgttttagaaagaaatgaaatgataaaactacaaaggactagaattctcaaggaaaaactgaagagaaaactgccagctgacttcaaggttctggaagcctcagatctggtgtatacagtcagcgcccaggagtactggcagcaggctctcctcaccgaggaggaaacggaaatccctaagttaagagaatacatcaggaagagcctcttggacaagaagaagaggacagtgaccaagtatgtgactgaagcctttggcctgttgctcctcacagatagtttcaactccacgcaaaacctgccgaatgaacacttgcacatgagtgtcctgcggagatttgcggaagagaaggttgagctgctggagaaggccatcgcacagtgcttcgcctgcatggagcagcctctgcaagaaggggtcaggaccgccaggacttcttaccgctgcatcctcagagcatgcttggtgaggagtaaaggaaaccaaggttttcatcagaccctgaaagctgtttgcctgaaaaatggcatctatgcctccaggactctggcgagaattgatctaaatgaagccctcactcagcccgtctatgaccagatcgaccctgtttttggaagcatttttaggacggggaagcccactggttcagctctgatgcctcacatagatgcttttaagcagtccctgcaggagaaaatgacagaaattgggataagaagtggctggaaatatgatagctgcaaaaaaaatttcctgatccaggagataagtgccatcctcgggggcctggaggaccacatcctcagaaggaagaggaggatctacgagtccctcactgcctctgtccagagtgacctgaagctctgttacgaagaggcagctcagatcacgggcaaaaaagcgtgtgagcggatgaaagatgccatcagaagaggagtggaccggcaggtggctgagggcatgtttgaaagggcccaggaaaggatgcagcaccagtttcagcagctgaagactggaatcgtggagaaggtgaagggcagcatcaccactatgctggcccttgcttcgtcccagggggatggcctctacaaggagcttgcagatgtcgggagtgaatacaaggagatggagaagctgcacagaagcctgagggaggtcgcggagaatgcacggctgaggaagggcatgcaagaattcctcctaagggcatcccccagcaaggctggcccccccgggacatcactgtaactcctggggcttagtcccaatggatgaaaaatcagcccagagccagagaattagaattactttttttgttcttaagagacaagatctatctacctctgttgcccaggctggagtgcagtggcaccatcacagctcactgcagcctcgaactcctaggctcaagcgatcctccagcctcagcctccagagcagctggggctacaggtacaggccaccacacctgggtaatttttttttttttttttttgagacagagtctcgctgtgtcacccaggctggaatgcagtggtgcaatctcggctcactgcaacctccacctcctgggttcaagaaattctctgcctcagcctcccaagtagctgggattataggcgactgccaccacacccggttaatttttatatttttagtagagacggggtttcatcatcttggccaggctggtcctgaactcctgacctcgtgatccacccatctctgcctcccaaagtgctgggattacgggcatgagccaccgtgcccggcccatacctgggtaattttttaattttttgtggagatggcatcttgctctgttgcccagggtggtctcaaactcctggcctcaagtgattctctcccacctcagtctcttgtgctaggattgcaggcatgagccattgtgcctggctcagaattctttctgttttgtgaaatctaatagaggacatttctcaactatttggactttgcatgcaatataaaactagtatgtttactgcattttattttatagccccaaagagtcatcttcaatacctaatggagttctaaagctttagggcaagaaacttttgcttccgcaaaaacatctaaacatcgctgggcatggtggctcactcccgtaatcccagcactttgggaggctgaggcgggcggatcatgaggtcaggagattgagaccatcctggctaacacagtgaaaccccatctctactaaaaatacaaaaaattagccaggcgtggtagcatgtgcctatagtcccagctacttgggaggctgaggcaggagaatcgcttgaacccaggaggcataggttgcagtgagccaaggtcgcgccactgcactccagcctggacgacggagtgagactatgtctc

SEQ ID NO: 307 - DNA, 902 bp, Homo Sapiens
gcgtgagccaccgcgcccagccggtgggcagccagttgtgttccgggaggaggaggacaccctggaaagacagtggggccagacactgaactgcctttggaagcaagtaggagcaacagcgaaggtttgctggctcagaagcaaggtctcgctgtgttaccctggctggagtgcagtggctacttacaggcatgatcatagcatactgcagcctcgaactcctggactagagcagttctcctgcctcagcctccagagcagctgggactgcagacacgcaccacagagcccagcctgagtcattttgattctgtaactggcttcctctcggcgggcaggctcacaccctccacccccagctggagatggaaggaggatgctcaccgcccattcctcatgcaggccatcgatggaaatgtcagacagtgcgagtccacgcctgaacacttctggggtccgctctgggactgacactggcagatccatcgtggcacccgagctctgtgagggcaagactttgttcggttgtgggctatgcccccaacccctcggacagtgcctgcacaggtggacatttttgttggatgaaggattttctgttaaatgtgtctggcacacacagaaaaacaaagcccagcagatgccgttccattgtttgctgactttcattgattctatgagaagtctgcagtcttttgcagcgttgttttcctatgtataattgtctcctcccaccccactcaccccagctgctttccacattctctctctttgattttcagcagtctgcccatgatgtgcctaaataggactttctttgcattcatcttggctggggctcactgaactttctgaatctgtagattaattttcttttttcaataaaccttggaatattttca

SEQ ID NO: 308 - DNA, 5754 bp, Homo Sapiens
atggcccagccttttccacccaaagacctgttactgaattttgtctccatgtgtctgaagggtacttccccatcatcattttcattcatcctaagaaaggcggctccctgtgtggaggtggtggccgcgaacattttggctgaactgagcagtcaaccttctcatttttgctggaaggatttgagagaatatgggggagatggtacacgagccagtggaggattagtggggttttatgttgttgtgatgaactttatgatcaacgcccccatcgagcttgctttgcttacgcaaggcctcagcctttgcctcttccccaaacccaagctacctgaggaggaggagctgagtgagggggagggaccaacagatttgtcccctgtgcaggctgcctgcctgcttgagttacatccacaaatgcctcggaagcagccagctggctgcatctttctcctcacattcctgggtctgtctgggctggttggcacagttaccagaacgtactacattgggattgtggaagaatactggaactatgtaccccaagggaagaatgttattactgggaaaagtttcacagaagacaaacttgcaaccttatttctcgaaagagggcccaacaggataggcagtatttacaaaaaggctgtttacagacgcttcacggatggaacctactccatagagatccccaaacctccctggcttggattcctgggccccatcttgagggccgaagtgggtgatgtgattgtcattcatttaaagaactttgcttctcgaccttactctctgcatccacatggcgttttctacaacaaagattcagaaggagccctatacccagatggaacatctggaaggaacaaaaatgatgacatggttcctcctgggaaaaactacacctacgtctggccggtgagagaagaatatgcacctactccagccgatgccaactgcctgacctgggtgtaccattcgcacatcgacgccccaaaggacatctgctctgggctaattgggcccctgctggtctgcaaggaaggtatcctgaatagatattcagggacacggaatgatgtggatcgagagtttgttataatgtttactcttgtggatgagaatcaaagctggtacctcaatgaaaatatcaaacatttctgcaccaaccctgattcagttgacaagaaagatgctgttttccagaggagtaacaaaatgcatgccctcaatggatacctcttcggaaacttcccggagcctgatatgtgtgttggagaatctgtgtcctggcacctatttggaatggggaatgaaatagacatccattctatctatttctatggtaacaccttcatcagcagagggcatcggactgatgtcgtcaacctgttcccagccaccttccttacaacagaaatgatagccgagaatcctgggaagtggatgataacctgccaggtcagcgaccacctacaagctggtatgctggggcaatacaatgttgataactgcaaaagtgatattttctaccccaagatgaagggtcaacagaggcgctactttatagcagctgaaaaaattctttgggattatgctcctcaaggctataacaaattcagtggtcttcctctaaacgcctctggcagtgactctgatctctacttcacacaaggggacaacagaataggaggaaaatactggaaggttcggtatactgaatttgttgatgcaacttttactaaaagaaagagactctctgctgaagaagcccatcttggaattcttggcccagtcatcaaggcagaggtgggtgataccctgttagtgacctttgccaacaaagccgacaaggtctatagcattttaccccatggtgtgatctatgacaaggcatctgatgcagccccaaacctagatggatttgtgaaaccaggggcgcatgttaaaccaggtgaaaccttcacatacaagtggacagtgcctgagagcgtaagcccaactgctggtgatcctccctgtctgacctatctttacttctcagcagttgatccaattaaggacaccagctctggcctggtagggcctttgctagtctgtaaaaagggcgtcctcaatgctgatgggacacagaaaggaatagacaaggagttttacctactgttcacagtctttgatgagaatctgagcagatattttgatgaaaacattcagaagtttatctggcatcccttcagcattgacaaagaagataaagagtttgtgaaatccaaccgaatgcatgctgttaacggctacatgtatggcaaccagccaggcttaaacatgtgtaaaagggatagagtttcctggcatctgattggattgggcactgacactgacatgcatggaattgtttttcaagggaacaccatccacctacgagggactcaccgagactccctggccctgtttccccacatggccacaacagcattcatgcagccagaccatgcaggtatttttagggtgttttgtgccaccatgccccacctctcgagaggcatgggtcagatctatgaggtcagcagctgtgacaacagggacccttctgagcagcggtacgggatgataagaactttttacatcgccgctgaagaagtagaatgggattatgcccctaacaaaaactgggagttcgaaaagcagcacgtggacgcaagaggggaaagacatggagatatatttatgaaccgcactgaaaattggattggctctcagtacaagaaggtggtttacagggaatatacggatggagaatttgtggagatcaaagcccgaccaccacgagaggagcacttagaactcctgggcccaatgattcatgctgaggtgggcaacaccgtcctgatcatatttaagaacaaagccagtaggccctactccatctcagcccagggtgtggaggagatggatagtggaaagcaattccaagtgcccatgacaaaaccaggagaagtaaaaacttatagatggaatatccctaaaagatccggtccagggccttctgatcccaattgtattccatgggtttactattcaacagtaaactttgtgaaggatacgtatagtggtttgatgggtcctctgattacatgccgaaaaggagtcttgaatgaaaagggaagaagaagtgacgttgattatgaatttgctctcttgtttttggtatttaatgagaatgaatcctggtatctggatgacaatattaagaagtatctcaacaaagatccacgagattttaagcgcactgatgattttgaggaaagcaacagaatgcatgccattaatggaaagatttttgggaatctccatggcctcataatgaacgaagatacaatgacaaactggtatttgttagggataggaagtgaagtggacatacataccatccattatcatgctgagagctttcttttcaaaatagataaatcttaccgagaagatgtgtatgatctctttcctgggacattccaaaccattgaactgtttgcagatcacccagggacatggctgctacactgtcatgtgtctgaccacatccatgctggcatggagacaacctacacggtccttcgtaacatagacaacaggattccttactccaccacatctcctggagtggcatctcacccagccacggtgccatctaacgaacgacctggcaaagagcagctctatttctttggcaagaatctgggtccaacaggagccaaggcagccttggtcatccttttcatcattggactcctccttctaatcaccacggtgattctctccctcagactctgctctgcaatgaagcagacagattaccagcaagtccagtcctgtgctctccccacggatgctctgtgaaccatctggtctccctcaacaggaaagggtgatgtcccacagctggccagatggcagccaacagggaaactggaccaaggcatcactcaccaaggaaggttgacactgtatcctggatcagccttctgatcctctcaaacatcatccaaagcaatttgcttttatttatttatttttaaatgggctgcgaataatcctcaggtataaaacacagaaaaaggagaatgggcatggctgagaatgtcaactcttagtctattctttggttggattcactgaataggagacactctgaaagatatctttatattccatcttttataattcttgaacagtgctttcttagctaaccaccaaagtttctaggtgaacagcttctagaaaaagttagagtgcctcagacatttaactggaagggcactactttttcaacattgttgcataacatgcatcccttggttctgtggaaaatatctttcttaggagttcttggcaatgtctaagtcagtgtctgctgatagaattagaccaaataaattttttggaggctttaaccagctctcctggccttttcctctttgatataaatagcctgtgcagtgcttgttttaaaaagcaaagttatacgttttttaaaaaattgctgctgtttttattcaaacctgtagaaatacttgaatgtttacaactcacttcatgttacatgtttttacaatatgtttctgtggcaatgtttgtactttcaaaaatcaagtagagaaattgtatttctactgcagactgtgggagggctgaaatctgtaaaagaacatgttaggctctccctttatgaatcagggactccctgagagtttagagcaagctttctatcagggagggaagctttgcaggaggcaagtctgggcttgaatttggagtctgatttttcattcagttagagggaatctttacaagtcctcatcttctatgaaattataacattctcattgtatgagaaacatcaggaggaatttatcaatgtaggtgactagataggagaagggacctctaaatatcctagattctatggcttttaaagacatacctcttcatggaaggagaaaaaaggaaaaggaaaggtgagaaaaagataatcttggtggcagattctcttaaaccattaaaccagctttgaaaattaataaataatttccaaggttcaaatgcaaaaaaattattgaacaactaaactcaacccattatgaggcaatctacactgtccatacctatgcttagacagtaggtgtaagattgataaaagtaacattgtttattacaagactgagaaattgcttttagctctgggcgagatgccctgagattccaatgccaatgctagatgagtgatactggtatgcctgccttagcagtgggtaatttgaatgtcaaagtgagtgacaaggacctaagaaatattctggtggagggacctttcacactgtctcatcttcatcttcatgaggggaaatgggtaattggatagaagctatagtcttaacataaaaggggatgcaaatgctaatagttctgttcatagtttgcttgaatgtcatatcaaacagcatacacaaaagattttgaatttcaatctgctaaccattgacaatgtgatttcatagtacatgttctacagttttcatacatgtgtaggctgcataatttcataattatggtaaatgccttatttattacccaccttagtaagacaagttgttcagttgtttttttttcttttcagtttatttttttaatgaaaacaaaaccacaaagtagtttgattgcatcatttatcattttaataaagtgtcacataaggtg

SEQ ID NO: 309 - DNA, 365 bp, Homo Sapiens
agcatagggacgacaggagccaggacccgtgtaggagatggttctcgccatgctgggggctctgcacccccgggctgggctcagcctcttcctccacctcatcctggcagtggcactgcttcgctcccagcctctgaggtctcagcggtctgttcctgaggcattttccgcccccctggaactctcgcagccactttccggcctggtggatgactatggcatcctccccaagcacccaaggccgcgagggcctcgacccctcctgtctagggcccagcagcgcaagcgggacgggcccgaccttgccgagtattactatgatgcacacctatgacccaaggccctcataaagataccatgtgtga

SEQ ID NO: 310 - DNA, 3735 bp, Homo Sapiens
atgcgcagcggcgggggttgttccggcagcctttcactgaggggacccgccagtttcaaattcagtggcgtttgccctgattcccggggcctggctttcagcgtagcaattctgccggcgaagaaggaagacttcatggcagagctgtaccgggttttggaggctggcaagattgggatatttgagagtccaactggcactgggaagtccttaagtcttatttgtggggccctctcctggctccgtgactttgaacagaagaagcgtgaagaagaggcacgactccttgaaactggaactggccccttacatgatgagaaagatgaatccctgtgtctgtcttcctcctgcgaaggggctgcaggcaccccgaggcctgctggagaaccggcctgggttactcagtttgtgcagaagaaagaagagagggacctggtgaaccgactgaaggcggagcaggccaggaggaagcagcgagaagaacgcctgcagcagctgcagcacagggtgcagctcaagtatgcagccaagcgcctgaggcaggaagaagaagaaagagagaatctcctccgcctcagcagggagatgctagagacaggcccggaggctgagcggccggagcagctggagtctggggaggaggagctggtcctcgccgaatacgagagtgatgaggagaaaaaggtggcgagcggagtggatgaggatgaggatgacctggaggaagaacacataactaagatttatcactgtagtcggacacactcccagctggcccagtttgtgcatgaggtgaagaagagcccctttggcaaggatgttcggctggtctccctcggctcccggcagaacctttgtgtaaatgaagacgtgagaagcctaggttctgtgcagcttatcaacaaccgctgcgtggacatgcagagaagcaggcacgagaagaagaaaggagctgaggaggagaagccaaagaggaggaggcaggagaagcaggcagcctgccccttctacaaccacgagcagatgggccttctccgggatgaggccctggcagaggtgaaggacatggagcagctgctggcccttgggaaggaggcccgggcctgtccctattacgggagccgccttgccatccctgcagcccagctggtggtgctgccctatcagatgctgctgcatgcggccactcggcaggctgcgggcatccggctgcaggaccaggtggtgatcatcgacgaggcgcacaacctgatcgacaccaccacgagcatgcacagcgtggaggtcagcggctcccagctctgccaggcccattcccagctgctgcagtacatggagcgatacgggaagcgtttgaaggccaagaacctgatgtacctgaagcagatcctgtatttgctggagaaattcgtggctgtgctaggggggaacattaagcaaaatcccaatacacagagtctgtcacagacagggatggagctgaagactatcaacgactttctcttccagagccagatcgacaacatcaacctgttcaaggtgcagcgatactgtgagaagagcatgatcagcagaaagctctttggcttcactgaacggtacggagcagtgttctcatcccgggagcagcccaaactggctgggtttcagcaattcctgcagagcctgcagcccaggacgactgaagctcttgcagcccctgcagacgagagtcaggccagcgtcccgcaaccagcttccccactgatgcacatcgaaggcttcctggcagctctcactacggccaaccaggacggcagggtcatcctgagccgccaaggcagtctcagtcagagcaccctgaagtttttgctcctgaatccagctgtgcactttgcccaagtggtgaaggaatgccgggcagtggtcattgccggggggaccatgcagccggtgtctaacttccggcagcagctgctggcctgtgccggggtggaagctgagcgcgtggtggagttttcctgtggtcacgtgatccctccagacaacatcctgccccttgtcatctgcagcggggtctccaaccagccgctagaattcacgttccagaagagagacctgcctcagatgatggacgaggtgggtcgcatcctctgtaacctgtgcggtgtggtttctggaggggtggtctgtttcttcccctcctacgagtacctgcgccaggtccatgcccactgggagaagggtggcctgctgggccgtctggctgccaggaagaagatattccaggaacctaagagcgcacaccaggtggagcaggtgctgctggcgtattccaggtgcctacaggcctgtggccaggagagaggccccgtgacaggggccctgctcctctctgtggttggaggaaagatgagtgaagggatcaacttctctgacaacctaggccggtgtgtggtgatggtgggcatgcccttccccaacatcaggtctgcagagctgcaggagaagatggcctacttggatcaaaccctccccagagcccccggccaggcacacccagggaaggctctggtggagaacctgtgcatgaaggccgtcaaccagtccataggcagggccatcaggcaccagaaggattttgccagcatagtgctcctggaccagcgatacgcccggccccctgtcctggccaagctgccggcctggatccgagcccgcgtggaggtcaaagctacctttggccccgccattgctgctgtgcagaagtttcaccgggagaagtcggcctcttcctgatgggcaaccacaccaccgcccggcgccgtgcccttcctttgtcctgccctctggagacagtgtttgtcgtgggcgtggtctgcagggatcctgttacaaaggtgaaacccaggaggagagtgtggagtccagagcgctgccaggacccaggcacaggcgttagctcccgtaggagaaaatgcgggaatcctgaatgaacagtgggtcctggctgtccttggggcgttccagggcagctcccctcctggaatagaatctttctttccatcctgcatggctgagagccaggcctcccgcttggtctccacaggaggctgtggcagctgtggcatccactgtggcatctccgtcctgcccaccttcttaagaggcgagatggagcaggcccatctgcctctgccctttctagccaaggttatagctgccctggactgctcactctctggtcttaatttaaaatgatcccatggccacagggctcctgcccaggggcttgtcaccttcccctcctccttcctgagtcactccttcagtagaaggccctgctctctatcctgccccatagccctgcctggatttgtatccttggcttcgtgccagttcctccaagtctatggcacctccctccctctcaaccacttgagcaaactccaagacaccttctaccccgacaccagcaattatgccaagggccattaggctctcaacatgactatagagaccccgtatcatcatggagacctttgttcctgtgggaaaatatccctcccacctgcaacagctgcccctgctgactgcgcctgtcttctccctctgaccccagagaaaggggccgtggtcagctgggatcttctgccaccatcagggacaaaccgggggcaggaggaaagtcactgatgcccagctgtttgcatcctgcacagctacaggtccttaattaaaagtgtactgttggtt

SEQ ID NO: 311 - DNA, 4810 bp, Homo Sapiens
atgggcattctggaggagttgcccgaaattggcgatcacacttgttcttctggcatccccgctcggcgatgcatctgccaagttgcctttggttttatgaggcatgtgtttccagagtgttttgaattaaatatcgcggaagcccccaaagtatcagcgccgcttcgtggagcctggcgactgctttgggaagtcctgctggcaggcactctgcccctgggggtgtgcaaagagttgtccagttaccttgatcttctcacagcctcctccccagggcaccaggagagaccaggattggaggacggtaaagaacacacttcccagaggattcttggaggtggcttcctccaggcagtaaatctacagcccaggctccctgcatcttatggctccaatcactttggatctcatcgtcgcctgcacattgccatacacagggaaggagaagagatggagaaggcaaagactttctgaaagccgtggctaaaagctggcatgtgtcacatcagctcacattccattgtagagacggggtttcaccgtgttagccaggatggtcttgatatcctgacctcgtgatccgcccgccttggcttcccaaagtgctgggattacaggcgtgagccaccgctcccggcctggcaggcattcttgaggcaaacgggaaatgggtgaacgggaggaacattggcagcacttgtggtctgcaccaagaactgaatcgaatttccatgtgttattgaatgttcacaaagaccttgtacagcgagtgttactacctctggtcaatgattcaactcaaggctcagaaaagtcaagtgtcttgtccagggacacttagtcagaagtgaatccaaggtttaagctcaagtctgcctaactctgaatttcacagccttttgctacatatggcgaataatatatccctgagcactaaaggcagactccaaggatcttgtctctgcaatcatcattctggccataatttatgaaaagcaacccaaagtatgtgatgtaataaaaagtactatctatgagtttacccttccaaaaattgaactgaattctgagctctaaatttggaatcaaaagaacttttctctgcactaatcatttggaacatcacttaaagaaaacaacgaaaaactggtgtcccctgagagaaagcaatacaaaacattatgcataaagaaatccttccaaaaaataaaccaaatccagtcaaatctctagttttgactcctagcttaccggaaatacgtgatgggaaaaaaatgaaatgacaccactatgattcaatcagccaaatccagcatatgcaaatttctaccagataaatggtttagtttcttccccaaacaaatggcacaaggaaacggaggtaagaatgggatgctgttatagattttaaaagatttaagaaagtataaactaaatacactatgtgcatcctctctgaacgtgcttcaaacatatcaaggggtcaatgagcagttttgaaacaataagggaatttgaacactgaatggttgtcagaagatagtaagagatcattattaattttactagacataatgatgttctgattttgttttttttttaaaaaaaaaacagtgttatttcctttatagatacatcatatagtattaactaatgaaatgctttgatatctggaacgtttaaaaaatattcccgatggagtaagtgcaaagaaacaggtaagcaaaatgctgataattgctgaaacacaggatgtgtacctggggcttcatttactatctcttcattttctattttgatatttgttggacattctcataaaaaggaaagttatgttttattttctcataagctagtaatgaaatagccctacgtaactgatattgtagagacaagaataggtgtaatagagcttaaggttttcatttaaaaaactatctgtagacttcaatggatcttaggtggcatccatgcaataacactcgtggaacatgcaggacaggtgtggagctccatcttcacacagtgacattttttatgcttctgttttccctaagagtggagtgagaggatgattattttatatcatggacttcttccctgctatactttttttaattattttactttcacttctgggatacatgtgctgagcatgcaggcttgtttacataggtatacatctgccatggtggtttgctgcacctatcaacccatcatacaggttttaagccctgcatgcattaggtattcgccctaatgctctccctcgcctttccccccaccccctgatagcccccagtgagtcatattcccctccctgtgtccatgtgttctcattgttcaactcccatttatgagtgagaatatgtggtgtttagttttctgttcctgtgttagtttgctgagaatgatgttttccagcttcatccatgtccctgaaaaggacatgagctcattcttttttatggctgcatagtattccacggtgttatatgtgccacattttcttaatccagtctgtcattgatggacatttgggttgtttccaagtctttgctattgtaaatagtgctgcaataaacatatgtgtgcatgtgtctttgtagtagaatgatttataatcctttgggtatatgcccagtaatgggactgatgggtcaaatggtatttctggttctagatccttgaggaattgccacactgtcttccacaatggttgaactaatttatactcccaccaacagggtaaaagcattcctatttctccacatcctctccagcatctgttgtttccaaatgttttaatgattgccattccacctggcgtgagatggtatctcattgtggttttgattttcatttctctaatgaccagtgatgataagctttttttcatatgtttgttggccacataaatgtcttcttttgacttttatgtggaaacaaatttaactgcacagagaggtgaaaattaattaataacttttaaagtaattccctaagtttctaaggatctatatgtttccatctgactttattttatttaagctcttgattgatgctgcatttggagcaggttcatgaacatgaatagagttaatctgggacagatttccctcatttgattttttcactgtttccatcacagaacttatttcatgctcaccatgtttgcaggcattgagcttggtactggagccacagagctggatcagacagacttgtgcaaatatttcaggttttttttgtgggggggtcatatttatagataaataacagtaaagagtgacgggttcttatgaaaatgcatacacagtgaagtagagggtgaaaaggagggatgtgttctatgaggaggaagagtgataagaaagtgtaaggggatgtgtctgtgtctagacatatgtgtgttcacgtgtgtgcgtgcttgtgtgtactgcatgtgtatatgtgtggccatgcacctgtgtgcatgttcatgtgtgtgtgtgtatgtgtctgtgttgaggactaaattaattgggcttatggaagcagggagccactgataggtttaattagagactgacatgatatgatagtttaggtggatttctctgggggctgtgttgagggacagtggggaggagagctagaaggaagaaaaggacacatgcataacagaagcaatatctgtctatgggatggtggaaagaatcagaaaagacttaataaaacatgtgacactttaactgaatcttgaaatagacaagtgttggaggagggagttggaccagatacttcatgcaaagggaagaaaagtgcacaaacaaaatatgagaaacaaggcagacaggcatttttttaaaattttcgcacccactgatagaccagtgatgcattcacatcgtctgcattcatgatcaacaaaagtgctttcctagaacatgaacctcaacccaagtgtcgcctcaagtagtgtatgcatgaactcaagcattaaattagaattgattttttaaaaaactcacacaaacagatgtattatttaaaaatctttaaagcaggtttaaacagttttcaggattaaaagcagccactattagaaagaacaaaaatacatttgacataaatataaggagcctcaatagaacctcctgtacccagtcattgtcaatgccacatccattcattcaccagcccttatatcaatgcttgctgggctcacttaccacgatcagcacgtgcatgtccttatctgaaagcttgccactcaaatgtgctcagtcttacctgtgtggctgggagtgttggggatttaatgtcaagggaaagaatcttccatcaatgaatgatgaaagttagttttcacaacttccggtccccttggccctcatcaaagggctccaggtgaggtttgggctccttgctatcctccgagtttccacggtagttttaagcaccattgcccgtggtaatggctgacattgatactgcactttttttttatttaagatggagttcccctctgccacccagactggagtacagtggcgcgatcctggccatcgcaacctccgcctcccagatccctcctacaacacatgagaattgtgggtgctacaattcaagatgagatttgagtggggacaaagtcaaaccatatcattagataggacactggagaaaggcaagaaagaaaagacatctgaagaatgaagggagccaaagaaatgccaacattttgctttttgaagaaaagctaaattaaagtcaaaatggatttatcaatttccttgggttcgtgaatgtacagaactttattaag

SEQ ID NO: 312 - DNA, 678 bp, Homo Sapiens
ggaaatcaggagaaatagggaaatcacggctgcgtgtggttttcgttttgggggctcatgaagcggcctgggccctgtgactcctccagggattccacatcccaggtgctgcgggacctgcgggggcgagaaagctgggccggtgacaggagggcgcaacccaccccatcccccagggaaagggcttctcccagttccccaccctcccagcccccgcccggcccattacctcttcttcttgtctctcttgtccaagccagggtccctgagcatgagaatgagctccactctggggactatgcccctccaggcagctctgtggagatcgccaagatcttccaggcagacgtcgtacccaggctccaggaaggcgctgtcattgtgctcggctccacagcccacgccgtcctcgctgctcctccttattcaattattaaaactagtgaataaattcagcaaagttacagcacaaaatgtcaacacatggtaatctgttgtatttctagacactagcaacaaacatcagaatgtaatgatgaaaacgattccaggcatgaaccaccaaacttggcctaccatttactgttatcagaaattaaaacaagtcaattcttctctctcacttgctgtcactctgaattatttgcttacagaataaacataactttgtgtccaaaa

SEQ ID NO: 313 - DNA, 7224 bp, Homo Sapiens
atgaagagtgcagagtctcaaggccgatatgagattatgctaagtctgcaaaatatattgaatggactaggagctgccgctgcaccttgtcacagggatgtttataaagctgctagatcctgcttgacagatagatccatggctgttcgttgtgctgctgcaaagtgtctccttgaacttcagaatgaagccatctttatgtggagtacggacctggacagtgtggccacactgtgttttaagtcctttgaaggttccaattatgatgtgcggatttctgtttcaaagttactaggcataatattagctaaagctgtaatttctaaacatccaggaacagcagcctcacgtcaaagcattcgcagagtatctttggaggaagttctggaattactaggaacagggtttctacgtgggagttcaggattccttcgagccagtggagatatgctgaaaggaaccagttcagtcagtagggatgttcgagttggagttactcaggcttatgtggtatttgtttcaacactaggaggagcttggctagagaaaaattttgctgcctttttttctcatatcctaagccttgcgtcaccgtcacaccctaaagccacccaaactcagatcgatgccgtctgctgtcgccgttgtgtttcatttattcttcgaactactataggtggtcttcttggagaaaaggctcagcttgctgctgtaaaggatatttgccaggccatctggaagctaaagaaagttatggatgccgtaatgagtgatggtaatttggaaacccggcttggttccacagatgtagccgctagccaacatatgctggtttgtgctttacaagaacttggaaatctcatacacaatcttggcaccacagcggcacctttgctacaggattcaagtacaggtctccttgacagtatcttgtcagttattcttcatcctagcatttctgttcgactagcagcagcttggtgtttacactgcattgccgtggcattaccctcctacctaacaccactcttggatcgttgccttgaacggcttactggacataagtcttcacctgaagcagtgactggcttcagttttgctgtagcagctttgttgggagcagtaaaacattgtcctttaggaattcctcatggaaaaggcaagattattatgacattagcagaggatttgctgtgttctgctgctcaaaacagtcgcctttcagctcagcgcacacaagctggatggttgctgatttctgctctgatgacattaggtcctgcagttgttagccatcaccttgctcgagttctgctgttgtggaagtgtgtctttccagcatctcctaaagatctagaaacagaaaagagccgaggagattcgtttacatggcaggtgaccctggaaggacgagctggtgcactgtgtgctatcaagagctttgtttcccactgtggtgatcttcttactgaggaagtaactcagcgtcttcttccaccacttccttgtgctgtggatttgctaactcagctttcttcaatactaaaaatgtatggaagtcctttgaaaacaccgtcagtggtttatagacaaagactttatgaactgttgattttattacctcctgagacctatgaaggaaacctctgtgctatcctcagagagctggctgctgacttgactgcccctgatattcaggtggcagcatctacatttttacttccacccctctgtcatcaggatgatcttttgatactaagtcctttcctacaagagactgaccatagatttattgaagaacagctcctgcttggtaatggtgttgcttgcggaagtcttgaatatgacccttattcgatttatgagaaagatgtagagggagattcagtgcctaagcccttacctccagcactatcagttattagttctgcatccaagctctttggggttgtatgcgctcatgtgggagaaactcaaaggcttcttatattggaacagcttttggacagtataaagcacacaaaaggagctcgtcagcaagtggttcagttacatgttgtttcttcagtttctagtttcttgaagtacgtggctggctccaagggatgtttaggtccagaagaaatgaaaagatttgccttaacattagttatgggagccctagaaagccccaaccccttgctgagatgtgcagctgcagagtcatgggctagattagcccaagtggtagatgatggagcttttactgctggattagctcaagttagctttgacaaattgaaatcagcaagggatgtggttaccagaacaggacactcattggccttggggtccctacataggtatttaggaggaataagttcttctcaacacctaaattcttgtattggaatcctttatactttggcgcaggacagcacttctcctgatgtgcagacctgggcattacattctctatcattgatcattgattctgctggcccactctattatgtgcatgtggaacctaccctttctcttattataatgttgttgttaaatgtgcctcctactcatgctgaagttcaccaaagccttggtcgctgtttgaatgcccttattaccacgttaggtccagagctacaaggtaacagtacttcaatttctaccttaaggacttcctgtctactgggttgtgcagtaatgcaagataacccagactgccttgttcaagctcaggccatctcttgccttcagcagcttcatatgtttgctccacgacatgtcaacttgtctagcctggttagctgcctctgtgtgaatctttgtagcccctacttgttactgagaagagcagtactggcttgcttacgtcagcttgtacaaagagaagcagctgaagtttcagaacatgctgttatgcttgctaaggatagcagagaagagttgactccagatgctaacatcagagaagttggccttgagggggcattgttgatcttactagacaaggagacagatgagagattatgccatgatatcaaagagactttaaattatatgcttacatctatggcagtggaaaaactctccctgtggttaaagctttgtaaagatgtacttgctgcatcagctgattttacagctgtaacttgtgtggatacaatgcaagaagaagaaggagataaaggggatgatgcctcagtcctgaccaccagacgtgatgaaaaatcccatccttttaccaatccccgatgggctactagagtctttgctgctgaatgtgtctgtaggataattaaccaatgtgagaatgctaacagtgcacattttgacattgctttagcacaagaaatgaaaaaaagagattcaagaaatgactttttggtactgcatcttgctgacttaattcgcatggcttttatggctgccacagatcacagtgaccagctccgtctttctggccttgaaatgctgttagttgttattcggcgatttgcaactgttccagaaccagagtttccaggtcatgtgattctggaacagtatcaagccaatgtaggagcagcgcttagaccagccttcacttcagagacaccacctgatgtcactgccaaagcatgtcaggtttgcagtgcctggatagcaagtggagttgtaagtgaccttaatgatctccgaagagttcatcagttgcttgtttcatcgttaactaaaatacaggctggaaaagaagctctaagtcacttatataatgaaagtgcttctaccatggagatcttagctgtgcttaaagcctgggcagaggtctacataattgctgtgcaaagacataaaaaccacagacaacctttgaagactaccacctgtttagaagacggtatcagaaatggatcatgttcatcagatggactgcttgacttagtctatgcagatcttggcacactaagcagactctggcttgctgcacttcaggattttgctcttttaactttgccttcagaatttgcctcccaacttcctgctgaaggtggtgctttctacacagcagagactagtgaaaatgcaaaattgcattattacaactcctgggcacttatcctccatgctacagcattgtggcttacaagcacgggttttgttgttgctgacccagatgaaggagcatctaatctctccaggcctgtaacaccaacttccatgtgtcagggttcatcatctggggctaccataaagtcccctgaggatgtctacactgatagattccatcttattttaggaatcagcgtggaatttctatgttccttacgttcagatgcaaccatggaaagcataactgcttgtttacatgcattgcaagcacttctagatgtaccttggcccagatcaaaaattggcagtgatcaggacttgggtatagaattgctgaatgttctacatcgagtaattttaaccagagaatcaccttccattcagttggcttcacttgaagtggtaaggcagattatctgtgctgctcaagaacatgtgaaggaaaaaagacgaagtgcagaagttgatgatggggctgctgaaaaggaaactctgccagagtttggagagggaaaggacaccggaggacttgtgcctggaaagtctttggtctttgcaacactggaattgtgtgtatgcattctagttagacagctcccagaattaaaccctaaattgacaggtagcccaggagtaaaagctacgaagccacagatactattagaagatggaagtagattggtttcagctgcattggttatcctttccgaacttcctgcagtgtgctctcctgaaggaagcatctcaattctccctactatattgtacctcacaatcggggtcctcagagagactgctgtgaagttacctgggggccagttatcttcgacagttgcagcttccctacaggctctaaaaggaatattatcttctcccatggcccgggcagaaaagagccgtactgcttggactgaccttctccgaagtgccttaacaacaattcttgactgttgggatccagttgatgaaacacaccaagaacttgatgaagtcagtctacttactgctatcacagtgtttattttgtctaccagtccagaagtaactaccatcccatgccttcagaagcgctgtattgataaatttaaagctactcttgagataaaagatcctgtggtacaaatcaagacctaccagctcctacattccatctttcagtatccaaatccagctgtttcctacccatacatttactctttagcatcctgtatcatggaaaaactgcaggaaatagacaagagaaaacctgaaaacactgctgagcttgagatcttccaagaaggcataaaggtcttagaaacactggttactgttgctgaagaacaccatcgcgctcagctggtggcctgtcttttgcccatcctcatttccttccttttggatgaaaattctctgggatcagcaacttccataatgagaaatttacatgactttgctctacaaaatctcatgcaaattggacctcagtattcatctgtttttaaaagtttagtggcttcttctccagccctaaaagcccgccttgaggctgctataaagggcaatcaggaaagtgtcaaagtcaagataccaacatctaaatatactaagagtcctggaaaaaactcaagcatccaattaaagaccagtttcctctgattttttttttggaatagtaagcaccttaatataataaatacttgatcattgcctttggtgacaaaagggacattgtagacacaagtgcccttagaggtctagttgattgttttaccttaaatagctgtgactcttcaaagtaacagcatacttaacatttttgtgtgtgtgcgtggggtttgtgttttgttttgttttgtttttctatttaaaaagacaatggagctaacttgccaggaattttaagaaagtgctaaagaactaaacttactaaacaatccactgctttaaaaatgaaatgaatttcttctaacagtccatacatatgtggtatacttaatactgtgacagatataaatatgactctagtgtaaattatctgcactaatattgtatcccaattgctgatttaaaattctgctttggcccggcacagtggctcatccctgtaattccagcactttggaaggccaaggcgggcggatcacgaagtcgggagtttgagaccagcctgaccaacatggtgaaaccccgtctctactaaaaatacaaaaattagccgggtgtggtggcacacacctgtaatcccagctactcaggaggccgaggcaggaaaatcgcttgaacctggcaggcagaggttgcagtgagccaagattgtgccactgcactccagcctgggcgacagagtgagactccatctaaaaaaaaaaaaaaaaaattctgccttattcagtaattgtattaaactttctctgatttctccaagaagataaaatgattggagagctatttaggaaacctggtctaggattatccagtatacaatagtacaaattacttacagccttacagtgcaacataagatttggtgtctatatcatggttttccaccatcttttggtttagtttatattgggttcagaaattgagtcttactcattttaaatagaataagccatttccactatttttcaaatggatttttctgtttacctctgttcttaccaattttgttcattttcatttgtggcaaacatttgtatcaatgagttttaacctaggttcatatctacattgtatttagatcaactatgggtttatataaatgccaaatttagtacaacaaatttaggtcatcaggtgaatacaagtattttttttaacaggaaacattttattatagaaaaaagattaatgataaagtcatattggttgaaaaatattttttaactgtgttcatgattgttgattctccttctacttcagtgttatactgtgtgaatcaagcactgtgtcaaaacagagcatttccctcttaaaaattacaaaccgaagtgatagaagcatgtcagaattgagaagacattttgaagcaagaacaatgtgatgtacctattttattatgtttgtatataaatactattgtaaattgttcagagtgaaaacatttgacaaactctaacactacaatcattttttctaaattacataaataaagctaattttcattat

SEQ ID NO: 314 - DNA, 3910 bp, Homo Sapiens
tacatatttgttgaatgcttttaggacatgagatgagaagggggagaaatactcacgatgtggagctggaggtgcgtgggcagccggtgaacagtaatggaacattgacacaagccaggtgggacgagtgtggtgggatggcctgcgagaggggagcagaggggacagggctgggcaagtacccagaggcagccgcctggtgcaccttgagaggtatgcatgagaggaacaccagagagggccagggtgggcagggtggcggtgggcaggaggagtgagggtgggagaaggcactgtctgggatgggagatgggggtcttcgggattccctagtgctttccctaagagcagtaggggcgactgaaggctctgggccagagagtggtataattcagttgtttttagattctggaaaaagaactgggagctacagcatattctttccacttctgccctaaactttgttgagtcccatatgctgggaggctgaccaggtgtggcagtgggagctggatctccctccagtcttaaggtgagatgtaggatgtgatttataggtcagatatgagatggaaaatggcagccgacaggacgtggctgatgagggaataacctgctcaaagcctgggacagaaggactaggaggaagaaatgttgaaagagggtttcaaggcattttccaggagagtatgatctaaagcatcttctctatctccccaggtgaatgtttgctagcgctgcagagcccctcagtcactcaatcggtgcagacgggtggcagaaaccactggagtcatgtgaatggggacactttcctatgaacagtggttacacaggcaaaggcacccgcccctaaaagaagtcaaagactttttgtctggaaccaagatggccgaataggaacagctccggtctacagctcccagcgtgagcgacgcagaagacaggtgatttctgcatttccatctgaggtaccgggttcatctcactagggagtgccagacagtgggcgcaggacagtgggtgcagtgcgccgtgcgcgagccgaagcagggcgaggcattgcctcactcaggaagcacaaggggtcaaggagttccctttcctagtcaaagaaaggggtgacagacagcacctggaatatcgggtcactcccacccaaatactgcgcttttccgacgggcttaaaaaacggcgcaccaggagattatatcctgcacctggcttggagggtcctacgcccacagagtctcgctgattgctagcacagcagtctgagatcaaactgcaaggcggcagtgaggctaggggaggggcgcccgccattgcccaggctcgcttaggtaaacaaagcagccaggaagctccaattgggtggagcccaccacagctcaaggaggcctgcctgcctgcctctgtaggctacacctctgggggcagggcacagacaaacaaaaagacagcagtaacctctgcagacttaaatgtccctgtctgacagctttgaggacagcagtggttctcccagcacacagctggagatctgagaacgggcagactgcctcctcaagtgggtccctgacccctgacccccgagcagcctaactgggaggcaccccccagcaggggcagactgacacctcacacggccgggtactcctctgagacaaaacttccagaggaacgatcagacagcagcattcgcggttcacgaaaaccactgttctgcagacaccgctgctgatacccaggcaaacagggtctggagtggacctctagcaaactccaacagacctgcagctgagggtcctgtctgttagaaggaaagctaacaaacagaaaggacatccacaccaaaacccatctgtacatcaccatcatcaaagaccaaaagtagataaaaccacaaagatggggaaaaaacagagcagaaaaacgggaaactctaaaaagcagagcacctctcctcctccaaaggatcgcagttcctcaccagcaatggaacaaagctggacagagaatgactttgacgagttgagagaagaaagcttcagacgatcaaactacgagctacaggaggaaattcaaaccgaaggcaaagaagttaaaaactttgaaaaaaatttagacgaatgtataactagaataaccaatacagacaagtgcttaaaggagcagatggagctgaaagccaagactcgagaattacgtgaagaatgcagaagcctcaggagccgatgcaatcaactggaagaaagggtatcagcgatggaagatgaaatgaatgaaatgaagcgagaagggaagtttagagaaaaaagaataaaaagaaatgaacaaagcctccaagaaatatgggactatgtgaaaagaccaaatctacgtctgattggtgtacctgaaagtgacggggagaatggaaccaagttggaaaacactctgcaggatattatccaggagaacttccccaatctagcaaggcaggccaacgttcagattcaggaaatacagagaacaccacaaagatactcctcgagaagagcacctccaagacacataattgtcagattcaccaaagttgaaatgaaggaaaaaatgttaagggcagccagagagaaaggtcgggttacccacaaagcgaagcccatcagactaacagcggatctctcggcagaaactgcaagccagaagagagtgcgggccaatattcaacattctcaaagaaaagaattttcaacccagaatttcatatccagccaaactaagcttcataagtgaaggagaaataaaatactttacagacaagcaaatgctgagagattttgtcaccaccaggcctgccctaaaagagctcctgaaggaagcactaaacatggaaaggaacaactgttaccagccgctgcaaaatcatgccaaaatgtaaagaccatccagactaggaagaaactgcatcaactaacgagcaaaataaccagctaacatcataatgagaggatcaaattcacacataacaatattaactttaaatgtaaatggactaaatgctccaattaaaagacacagactggcaaattggataaagagtcaagatccatcagtgtgttgtattcaggaaacccacctcacatgcagagacacacataggctcaaaataaaaggatggaggaagatctaccaagcaagtggaaaacaaaaaaaggcaggggttgcaatcctagtctctgataaaacagactttaaaccaacaaagatcaaaagagacaaagaaggccattacacaatggtaaagggatcaattcaacaagaagagctaactatcctaaatatatatgcacccaatacaggagcacccagattcataaagcaagtcctgagtgacgtacaaagagacttagactcccacacattaataatgggagactttaacaccccactgtcaacattagacagatcaacgagacagaaagtcaacaaggatacccaggaattgaactcagctctccaccaagcagacctaatagacatctacaaaactctccaccccaaatcaacagaatatacatttttttcagcaccacaccacacctattccaaaattgaccacatatttggaagtaaagctctcttcagcaaatgtaaaagaacagaaattataacaaactgtctctcagaccacagtgcaatcaaactagaactcaggattaagaatctcactcaaaaccgctcaactacatggaaactgaacaacctgctcctgaatgactactgggtacataacgaaatgaaggcagaaataaagatgttctttgaaaccaacgagaacaaagacacaacataccagaatctctgggatgcattcaaagcagtatgtacagggaaatttatagcactaaatgcccacaagagaaag

SEQ ID NO: 315 - DNA, 1139 bp, Homo Sapiens
atgtggacagggccgcaacagtgtcagggcgtttcctggctcctcaacagcaggatccgaagtcgtctggaggatgtgccgctctgcttggggcggacctcccctggagcgcacctcccctggagcgcgcggacgcgcagggtgcacacagccctcttggaccccgggaccggctcaggctcaggctcggcgtcagcaaagggacctgcgcggcgccctggggcggaggaggcccgacggtcagtggccagtgccgtgcggctgacggaggtcggggcgcaacgggaccgggaggagcgcccagggcgggggtgccaggccccctccaaccgcgggcggccgcggcggatgggaagccgtgcacgacgagcacaatctccatggggaggacaacaggaatgttcctgtgagccccgccgcgccctaccgccagcgcagcccagcatcgcgggtcccctcctatcccaccggagaacggggtcctcactcccagcttcagccgagccctggccccgcaactgcctgaaggcacgccccctgcacctgcccacctcaggtcccgcctccagcccagtggccaagatcgcgggtctctacaatgacttggagccaccccggaagaccatgcgcagaggggtgctgatgaccctgctgcagcagtcggccatgaccctgcccctgtggattgggaagcctggtgacaagcccccacccctctgtggggccatccctgcctcaggagactacgtggccagacctggagacaagccccaggaggactattctatcctgtttgaagacacctcctatgcagacggctactcccctcatctcagtgtggcccagaggtacctggtagcttctaaggagcccaagaaaaagtgacgctgcccggcggactcgacgtcctccaccatcttggggcaggacagcagaggatgtgctgggattaaacagacatcccccctccacacatctcctgggttttacttctccaaacccttctcccctccccagatatggtgacctggggagctgaaggctgggggagaggtgaccatatgtggccccaccgggcattcactctttcagctcagagtttctcttcctttccaatacaggctctacatgaacacaaa

SEQ ID NO: 316 - DNA, 620 bp, Homo Sapiens
aaaagtcacagccttggggtttcagtgaagagacagcccaaatgctcttgaagtagtcagaaaagtctacaggtgtgactcccttatgccgctctctcctgccatttgggcaacagccaacttccgaggccaaccttgtttctggagaagcattcttcccacatgggaaaggcaaggatggtgctgagcctgtctgcctctgtgttccctggacaactccattccagtgcaagattctcatggttgaattcatattttaagtgctgtttgtggggttttgagcagttgccattctgaggaggagcagaggagcatggctttgccaaagtgtctcccaattatgagcaccatctgcaagagtccacttggaaaatactcaagagtgggcttctatgacttctgccttgccctggaggtccaatacaggaccagcaagttatttctgtgtggacagcccagtcccagaaggagcttgggaatacagcagcaggctttaaagcttgcctgtctttcgcctacgcttctggaatcctcaagttgtgttgacccacctgggaacactgctggttccagaatgccaagctccagtaattgtataaaataaaattaaaataccagaa

SEQ ID NO: 317 - DNA, 3811 bp, Homo Sapiens
tgctgcctcctatagacccagactctgattggcagtggagtccagggcctgagctcaggcctgggaaagactaggccccctttaggtttcaggccttgaaggaccatccagacttagggagcctgggccttggggagggagagaccctgatgccaggactgagctttgggcagcgaggtggggagggaaggtggccgcattcagaggtgccttggactcacaacaacacccccacccccgtgtgtgcagccgtgttgccgcccgctgtgctatgagcagtcagagcgccgtctccacaagagtttacaaatgaaaatggaggaaatgtctttgtctggcctggataacagcaaactagaggccatcgctcaggagatatacgcggacctggtcgaggattcttgtttgggattctgctttgaggtacaccgggctgtcaagtgtggctacttcttcttggacgacacggaccctgatagcatgaaggattttgagatcgtggaccagccgggcttggacatctttggacaggttttcaaccagtggaagagcaaggagtgtgtttgccccaattgcagtcgcagcattgccgcctcccgctttgctccccatctggagaagtgcctgggaatgggtcggaacagcagccgaatcgccaaccgccggattgccaatagcaacaatatgaataagtctgagagtgaccaagaagataatgatgacatcaatgacaacgactggtcctatggctcggagaagaaagccaagaagagaaagtcagacaagaaccccaattcccctcgaagatccaagtcattaaaacacaaaaatggggaacttagcaattcggatccttttaagtataacaattcaactgggatcagctatgagaccctggggccggaggagcttcgcagcctgctaaccacgcaatgtggggtgatttctgaacacaccaagaagatgtgcacaaggtccctgcgctgcccacagcacacagatgagcagaggcgaaccgtacggatttattttctcgggccctcggctgtccttccagaggtcgagagctccctggataatgacagctttgacatgactgacagccaggccctgatcagccggcttcagtgggacggctcctctgacctctcaccctctgattcaggctcctccaagacgagtgaaaatcagggatggggtctaggtaccaacagctctgagtcacggaaaaccaagaaaaagaaatcccatctgagcctggtagggactgcctccggcctaggttccaacaagaagaagaagccaaagccaccggcacccccgacgcccagcatctatgatgacatcaactgacttgggtgcaagggatagcctttggctgagcagagccctctctcctgacccccacccaggtggcatagcctggcaaatggacggctgctgggggttggggcttgggaagcttggtgggccaggcaggcagaggatccgattatgcgcccctggggggtgtcaaagtcctctgcaatggagcacgactcctcggcgtgcaggactcagacctggacatattatgccttggacataagtttggtggggaggcggttttcctatttattctgtgagttactggatgtccagctaggccaggggcctgacctgggcactgtgccagggcactgcctgccccccaccccaggaactggactaagccctgctgaggggcaatgtggcgacccgggaggctgtgggttggaagctgagcctggagggggcctgcctcggccgccctcagcaatgtgaatgggtccggtgcttggagctgaggggcaaggctgggcatgtcctgtctgtgtgcagaatcttatcaaatgcccccagtcccaggggtaggcaggcacagagtgctgtctgctgaggtgggcgtccagaactgccgccaccttccctgcccctcacaggggcagccctttcccctcagtccccatgggcctccttggcagcaggagctgtccttttgttgggtgccaggaaagggcctccagcctctacagcttcaaggaatgggaaagggagggtaggaagagggagaagtgtcagaattcctccccctgcctctcctccctgacccagggctggtgaggagtggggccccaaggtgagagggaacggtgctgctttatttgaaatgttttcttacctcattccctgccccaggaagggacccagcctcaccctcctggggtggccccgtgttcctcctgcccaccctgccccactgccctaccggggcagcccaggttcccaactgctgcttccacccccttcaccttgactggcttcagttcctctcagcgctcctgcctccaaagcgtgccctgtttcccttccttagcgcttttaagttatttattctgtacttgtggtttggggctctgaggaaaatcctaatcttgtgcctctccccctttgctaggagttgggtgggaagagagggtggcctctgtgccccaggttgtcagtggaggggaaggggtgtcactgcccctctgtgggactgtcatgccagtgtgcccacctgcctggtctacatcctaaagagatgtaccgtcccccctccatgcgggcaccaccactcccaggagccaagctggaggaccgcgacctgggctgggagcagagctgactgacatgggtggaggtgaccctgagccaagttctctggcacttgctggacatgtcccctaccctcttcccaagaggagccatcccacatttgggtagttagtacccaggactggttggactgatcgggttagggaccctagagggttaagggaacaacagagatggggctgcaatgccctgtctggaactccgctctcccgctggggtggttctgattgtggctcatgcctggttgcaaattggtttttaacccacaaattgtgattattttttaaaaagccaaacagattttggcaggagttagaataaatcccggggcctgggcttctctattcttggccctccgtagtctccctccgagaggaggccagagggagaggaggatctcagcaggcctctagccgcttccagatgcagtctggggagtgggctgaaggtgaagggaggaaggctgtgggccactctcccttctgagaggcagctgcagctcaggccctaatacactctttgccctgtggcctctcccttttccccccttctggttggaggagggagaagtgggaagtagcttgggaactggtttgtccacataaacttccccattgttccttggcccgccctcagggcagagccccctgcccaggctgggtaagagatgggcttggtccagcagggaccctgagggaacaaacccttttccttctggggagagagtgccccccctaccatgtagttgaacaggggctaggagctccccactcccctccctctaacagcaggctgtgtgggtttcaattcccatccttcccaccccggctaggtgtcgtccaccctgtatcctgtgtctgagtgtgtgtgggggggttctgtactaatttccatggccggtggcttttccttccatgcatcactcccccccgcatgcccaggggccacccgcctggcattaccgcatgctggggtcattgggggaggggggtggggctcacgctgtcctgtggtcttgagatttttatttttgcatatgtaatccattctgtacaggtagctaactttgtaaacgctgtgtattccctctgcccccatggctgctggtgtaaataaactgcatctcccgttggta

SEQ ID NO: 318 - DNA, 459 bp, Homo Sapiens
atagatggaaagcaggcgctgccctcaccgacctggcctcggtagcaggagtgtgtttttgtgtggacaactgcagttgggcccaggtccagccttgctgacggctactcacttgggcctccacccactgatgaattttgggggcagagccaagccccaagatatgttggctggcagcctggggccaggcagggctgctgttgtgggagcccagtcccagggactctgttcagagtggagcctccttactctacagctcgctggtaagccctggtggcccatcagcccacagaagggggcactcactcagtgtgcatcgggcagcggccagcaacctgcctctcacccacctggcccttctgggaggaccgggacttcctggggtcagattggaatgtacgtccaaaataagagtgaatggggatttgctgattattaaaacaattttgtttgcgtgca

SEQ ID NO: 319 - DNA, 10663 bp, Homo Sapiens
atgtcggtgggcgagctctacagccaggcgggaggtgacgggagacccccctccgcggtgtcctcctcgtcactgtcctcggagtccctaacttcggttggcggagaaagtttggcggttccgggaacgcccgcactgaccggccacccggctcctagaggttccgcagcgccacggctcagcaccaagccagggctgtcgccccctccccgccgcgcccctcactttcgttgcctgggctcggctccaaccgagttccccgaacggcagggcgaccctgccagctctgagcgccgtgcgcgggacgggcccccgcggtgctcccgctgctgtcccctgtccccgccgtggaccccaccccaggggctctgcggcgccggctctcgagggcgcgcctccgaggcgtcctttcctcccgcatacccacaacagggaaccctggacttgggagaggtgggggttctggacttggtggagagggaggagacaacctggcgtgagggcgcggcggctggatggagtgaggtgcctatgcacacgcctccatgcagagttgtgtgtgcgtgtggtgtccacgcgcgttgcgtgggtatgcgattcccgggacacccgcccgggccaacaggtctgggctgggtaggaacagtcacttccgcgtccttacctggcgatcacacgcggctgtctagcccatgtgggagcccttcggctccgtgggctggccacccttctaagtttgaggaattattcaactctcccattcctcctggaggggagcagggccgggatgagttcatgctcaggaaggtggccgcggaggctgtcacctggctgggggtggggccgcagcagcctcaaatacagcttccgagcccaccaggggccacctgtgcagcgatcagggatgggcgacggcctctgggggaggaggggaggagtgaggtttttctggatggagaaagagcaccagtcagtgccagacactttcagggtgatgtcaaacttttcattggatctgtgtgttgctggaccattgaggaggttccttacctggcttttctccacctggatcgtattcctgctcaaagacaagaagaagagagcagagaaagagcccagtgctttaggaggaatcttcagctctggtttggtttgctgatccctagacctggaaaagagaggggagatgcatgcatagtatgtggcttttggcccccagtgactgtgcctgagcaacagctagtaccagtgggagcccagcccaataaatgtgaagggaagatgaccaacagcacaccaatgggaatgttcttgatttgggctccccaaatttgcaggactaatcatcaccactgggttcaggatgcggtgtctgggcccatgaacactccttcagacagcggtacctgtagaaatgattaccagtgttcctgttcttggtcccctaatcacaggaatggacagggagtttatactgccagctatcaatgcacaagggtctggatccctgaccctgatgaggtatggcgctcagctgagttaaccaaggactacaaagaaggagacaagagcctacagctcagactggaggatgaaacgattctggaatacccaattgatgtacaacgcaaccagctgcccttcttacggaatccagatatcttggtgggagaaaatgacctgactgcccttagctatcttcatgagcctgcagttttgcataatttgaaggtccgtttcctggagtccaaccatatctacacttactgtggtatcgtacttgttgccattaatccttatgaacagttgccaatctatggacaagatgtcatctatacctacagtggccaaaacatgggagacatggacccccacatctttgctgtggcagaagaagcctacaagcagatggccagagatgagaagaatcagtccatcatagtcagtggggagtctggagccgggaagacggtatcagccaagtatgccatgcgctatttcgccaccgttggtggctcggccagtgaaaccaacatcgaagagaaggtgctggcatccagtcccatcatggaggccattggaaatgccaagaccacccgcaatgacaacagcagccgttttggcaagtacatccagattggctttgacaaaaggtaccacatcatcggggccaacatgaggacttacctcttggagaagtccagagtggtcttccaggcagatgatgagaggaattaccacatcttttaccagctctgtgctgctgccggtcttccagaatttaaagagcttgcactaacaagtgcagaggactttttctatacatcacagggaggagacacttccatcgagggtgtggacgatgctgaggactttgagaagactcgacaagccttcacactcctcggagtgaaagagtcccatcagatgagcatttttaagataattgcttctatcttgcaccttggaagtgtggcgattcaggctgagcgtgatggtgattcctgtagtatatcaccccaggatgtatacctaagcaacttctgccgactgctaggggtggagcacagtcagatggagcactggctgtgtcatcgcaagctggtcaccacctcggagacctacgtcaagaccatgtccctgcagcaggtgatcaatgcgcgcaacgccctggcgaagcacatctatgcccagttgttcggctggattgtggagcacatcaacaaggccctgcacacctccctcaagcagcactccttcatcggggtcctggacatctatgggtttgagacatttgaggtaaacagctttgagcagttctgtatcaactatgcaaatgaaaagctccagcagcagttcaactcgcatgttttcaaactggagcaagaagaatacatgaaggaacagatcccttggaccctgattgatttttatgataaccaaccttgtatcgacctcattgaagccaagctgggtatcttggacctgttggatgaagaatgtaaggtccccaaaggaactgaccagaactgggctcagaagctctatgaccggcactccagcagccagcacttccagaagccccgcatgtccaacacggccttcatcatcgtccactttgcagacaaggtggagtacctctctgatggttttctggagaaaaacagagacacggtgtatgaagagcagatcaatatcctgaaggccagcaagttcccactagtggctgacttgtttcatgatgacaaggaccctgttcctgccaccacccctgggaaggggtcatcttcgaagatcagcgtccgttctgccagaccccccatgaaagtctccaacaaggagcacaagaaaaccgttggccaccagttccgtacctccctgcatctgctcatggagaccctgaatgccacgacacctcactatgtccgctgcatcaagcccaacgatgagaagctcccctttcactttgacccaaagagagcagtgcagcaactcagagcctgcggggtgttggagacgattcgaatcagtgcagctggctacccatccaggtgggcctaccatgactttttcaaccggtatcgggtgctggtcaagaagagagagctcgccaacacagacaaaaaggccatctgcaggtctgtcctggagaacctcatcaaggaccccgacaagttccagtttggccgcaccaagatcttctttcgagcaggccaggtggcctacctggagaagctgcgggctgacaagttccggacagccaccatcatgatccagaaaactgtccggggatggctgcagaaggtgaaatatcacaggctgaagggggctaccttaaccctgcagaggtactgccggggacacctggcccgcaggctggctgagcacctgcggaggatcagagcggctgtggtgctccagaaacattaccgcatgcagagggcccgccaggcctaccagagggtccgcagagctgccgttgttatccaggccttcacccgggccatgtttgtgcggagaacctaccgccaggtcctcatggagcacaaggccaccaccatccagaagcacgtgcggggctggatggcacgcaggcacttccagcggctgcgggatgcagccattgtcatccagtgtgccttccggatgctcaaggccaggcgggagctgaaggccctcaggattgaggcccgctcagcagagcatctgaaacgtctcaacgtgggcatggagaacaaggtggtccagctgcagcggaagatcgatgagcagaacaaagagttcaagacactttcagagcagttgtccgtgaccacctcaacatacaccatggaggtagagcggctgaagaaggagctggtgcactaccagcagagcccaggtgaggacaccagcctcaggctgcaggaggaggtggagagcctgcgcacagagctgcagagggcccactcggagcgcaagatcttggaggacgcccacagcagggagaaagatgagctgaggaagcgagttgcagacctggagcaagaaaatgctctcttgaaagatgagaaagaacagctcaacaaccaaatcctgtgccagtctaaagatgaatttgcccagaactctgtgaaggaaaatctcatgaagaaagaactggaggaggagcgatcccggtaccagaaccttgtgaaggaatattcacagttggagcagagatacgacaaccttcgggatgaaatgaccatcataaagcaaactccaggtcataggcggaacccatcaaaccaaagtagcttagaatctgactccaattacccctccatctccacatctgagatcggagacactgaggatgccctccagcaggtggaggaaattggcctggagaaggcagccatggacatgacggtcttcctgaagctgcagaagagagtacgggagctggagcaggagaggaaaaagctgcaagtgcagctggagaagagagaacagcaggacagcaagaaagtccaggcggaaccaccacagactgacatagatttggacccgaatgcagatctggcctacaatagtctgaagaggcaagagctggagtcagagaacaaaaagctgaagaatgacctgaatgagctgaggaaagccgtggccgaccaagccacgcagaataactccagccacggctccccagatagctacagcctcctgctgaaccagctcaagctggcccacgaggagctcgaggtgcgcaaggaggaggtgctcatcctcaggacccagatcgtgagcgccgaccagcggcgactcgccggcaggaacgcggagccgaacattaatgccagatcaagttggcctaacagtgaaaagcatgttgaccaggaggatgccattgaggcctatcacggggtctgccagacaaacagcaagactgaggattggggatatttaaatgaagatggagaactcggcttggcctaccaaggcctaaagcaagttgccaggctgctggaggctcagctgcaggcccagagcctggagcatgaggaggaggtggagcatctcaaggctcagctcgaggccctgaaggaggagatggacaaacagcagcagaccttctgccagacgctactgctctccccagaggcccaggtggaattcggcgttcagcaggaaatatcccggctgaccaacgagaatctggaccttaaagaactggtagaaaagctggaaaagaatgagaggaagctcaaaaagcaactgaagatttacatgaagaaagcccaggacctagaagctgcccaggcattggcccagagtgagaggaagcgccatgagctcaacaggcaggtcacggtccagcggaaagagaaggatttccagggcatgctggagtaccacaaagaggacgaggccctcctcatccggaacctggtgacagacttgaagccccagatgctgtcgggcacagtgccctgtctccccgcctacatcctctacatgtgcatccggcacgcggactacaccaacgacgatctcaaggtgcactccctgctgacctccaccatcaacggcattaagaaagtcctgaaaaagcacaatgatgactttgagatgacgtcattctggttatccaacacctgccgccttcttcactgtctgaagcagtacagcggggatgagggcttcatgactcagaacactgcaaagcagaatgaacactgtcttaagaattttgacctcaccgaataccgtcaggtgctgagtgacctttccattcagatctaccagcagctcattaaaattgccgagggcgtgttacagccgatgatagtttctgccatgttggaaaatgagagcattcagggtctatctggtgtgaagcccaccggctaccggaagcgctcctccagcatggcagatggggataactcatactgcctggaagctatcatccgccagatgaatgcctttcatacagtcatgtgtgaccagggcttggaccctgagatcatcctgcaggtattcaaacagctcttctacatgatcaacgcagtgactcttaacaacctgctcttgcggaaggacgtctgctcttggagcacaggcatgcaactcaggtacaatataagtcagcttgaggagtggcttcggggaagaaaccttcaccagagtggagcagttcagaccatggaacctctgatccaagcagcccagctcctgcaattaaagaagaaaacccaggaggacgcagaggctatctgctccctgtgtacctccctcagcacccagcagattgtcaaaattttaaacctttatactcccctgaatgaatttgaagaacgggtaacagtggcctttatacgaacaatccaggcacaactacaagagcggaatgaccctcagcaactgctattagatgccaagcacatgtttcctgttttgtttccatttaatccatcttctctaaccatggactcaatccacatcccagcgtgtctcaatctggaattcctcaatgaagtctgaagatgcatgtttccagcattagtttgattcccaatgtgagcaagaaggaagtatatacagtaaagtaaattcaaggatctgttaaatctggtaaaagtagatcaaatcagagattgacagcctgtggagggtgctgaactatacagaattagacacaactatgtcattattttttgtacctactgctcagaataaaaacacttgaaatatggaagattttaagtttgatttcagtccaacacatatacataatttatagacaccaagcagtccccatagacatataaaaggtgtcaattctataaaacgaagctgcctagttttgatctttgcatagaactagagaatgtccaaattaaaataccaaatatatataagtcacataaattgccttcaaagggctttaacaaataatggtactaataaccatgataatggcatatactgacatttcccaaagtttgcaaaccataggtgtggttgagtttgtggtgagatgttttaagaacaaaaatatggggatgagacttctgagaaatattcccaaaatattttttaatggctgattatacacagacagtggtgtaactgacctccagaccagacattttgagtactggtttctgaagcaaaattagaagtgccagtcctcagtgtgctcaaacgcttttgtgttatcttgatttaatggaagagattattaaaatgctgctatcccaaactccaagtgagaaagatggaaaaatattttgtttctgatgctagtccatacactttccaagtcccacaaaactttcacaaaaatgtatataagctaaatattagaaacggataacaaacttgttttatttatagatgtaaaaaccaaacaagtcaatatgaaagcttttaatctcttaataccattaagcttccagtaagagcatcacataatgctctactgttccagaaaccaaatagtaaaacaaactaaagttcgcacatcagatcatctgaaaaaccttcaaaaataatcagttcagggatattatacaaaagtttgggttttttttttttaagagaataaaatggcttaggtcaactttcccttttcaggttattttcaacgtttttcaaatttagcacacaaaaaattgtaaatatctctcccacaaaataaggattttaaaaaagtaattcagtaatataacaggcttagatgtttgctgctcttagaattttttttaacttgtttttggtttcttcaaaagcaagcattcaattggaaacccatattctttccacacttttttttactgtcttttctgtatttcttgatagcagtatgctgttcccataagaaaaaaatggtatttgcaaatcatggaagaacagcctctgtattacattgagaaaataagatttatccatgaattggaagtagaacagcctgccttcaccctcttttactcaaccacccaacttaaaaggctcttggaaacacagcacactccacgctaccttctgcactgtgcccttagagcacagcttcctcagttgttctctgcatctcctggggcttaggccagtcttagcctgggttaaggctgctgacattgtgttccaatcagttgtcatgggcattatcccctctacatccacattaaacatgccggcttctcttgggcatcggcagagctgtgcctttttctttcagttacagttacataatcactgacgtccatgacacttacccatggatccatgtgctgacttcatttagaaggccaatctaaaacaactgggtttgtggctacctctttaaagttgtttgtgaaggataatttgttttttaatgcactttagtttgaaagtgagtctcttatgtaaggaccatccttaaaagaccaaaaatgccttgttagagtgttaaggagttttgacatgcagtggttccacaaacacagtggcttactatccttatacactgtcttataccatcattctctccatctctcttggtcactactctctgctgtcactggttaatcactaggtgccaagagcttactgaataaaagcttggcaattagaataaatggggagggaaggaccttatgaatagtccatttagcctaagaaatggcagatttagttcttctcttccaaaagataaaggtatatcctggaattgtacttaaaacttacagatgactaacaaatatatactttatatgtagttaatatttagatctgtcttatttaatacttggaggctagaagaagcatctttaggggaactatataatcttttgttagcattttctctgcattttaaaaaatcatttcaattcaaacatttatcagtgtcatgaaatcagtaatgactctttaacaattcaggtttgaactctgcattagatgtctctttaattttttaatatttaaaatttagttgacatttttttcaccaggtgcctttagcggttactaagataactgacatcagttgtttctctgaaataagtgttgctgtgggaataattttaatgttcaaggtgatatcatgggggagttttgtcttttaaaacattagaagcattttaaatattaagaatcaaatatttatagatcaaaacttgtgttttaagtattatacgggacctgtttacttatagtaaatgtgaatgtacacatgagttgttgctgaagctgacaagcatattacatacatgcattttccctgtgccctcatagttgcagttagagttccagtacctgtaggctcacctgggaggcagattagacccaaaggtagatgtttttcccctttccatgaagcatgtcagtgggagttgcttcctttgatttccctagtactaaattttaaggcttttgtaaaaacaaaacaaaactaggagcttggaacagttaaaaatcaacactgctaccatcaattcatcaaatatttacttagagctttcatacattaagattccagtaaccaataaattagaattcatttcttctgcataaagtaaattttcatacacttgacctactaagacagcaagggtgtcctaaattgaggcatttgtataatgcctgcataactaaatggtcactaaaatgggacagcatggggcaagaccttgtagttcttcacagaatatttgtggtcagtttctccaattaatttgctgcatgagccaaataaccataattcactttttatacccactggtgccataattagagaattagagggtgtagacagaggttaatgccaatgagaaacacaggacagggttttttttattataaaggtcattagatacaaaagattgtttttcaaaaaatttctaattctaacaaaggggatcaatcagaaatgaaactaagctactttctaaagtgacactgtatcagaataatccagatttgaatataacattttgccaccaactgacatttagatgaaggactgcctctctgaaagagttcagatcatattcaggggtgaatccaacaccatggaagaaagactactgatgaaaatattttcccactttgcacaaatctgtaaactacacctttgtttatagaaaaatgcttgtaatagtcactgtaatatttagctgtggataaaaatttgtggaaataaatacttttgaat

SEQ ID NO: 320 - DNA, 3816 bp, Homo Sapiens
atggacacctgtgcgcgcctcgcggcaggggctgctgagcacgcggatgggtcctctggaggctgggccgccaagaggcggcggctgcaccatctgatgctagagaacgagaaccgcagtgcgtgcccgacacaaagggaaggacaggggacactggaacaggggagacgacatggaagaaatctgggggagccaaaagccgccatgccgagaagggggtcggaggaggcgcgggagagaaaagcccagggctgtacactcgcatccctctgctgccggcccttcggtctttttttctgtttcctcaagtacattttctgctatgatgctgcaaacaggcaccaggatgagtcagacccatttaagattgttgagcctcacaggtttagcgatttaattacgtgttttgtgggatttgcaagctgcgtgcaatctccccgcgtgcctcaggtccacaagtggcagtggcccttgtctctctctggttttgtttggtggtacatcaggccagtctctggaagcccggaattgaggatgcaagcatgttcatgcgcgtggtgtaggatcgacggggaaggaaatcgctggagaccttccgctccctcctccacctggggctgggccgtgaaaacaataacagagtacaccagtcatcataagaagaaaaattcacatttaaagtttggaaagcaacaggacaaaggtctgtcttcagtggtgcgtagacatgctcgtgattgaattggaaatagttctctttccttctctctgacttcctaactgaaaagctgcagcgtggggagaaaggctgctcagaagcctggagccagaacacgcaccccggcttttgcagggccggctcacttggttagaatcaaaggaaaagccttgttatttgggaagctgggcgtcctcaccaaattaggggatttaatttgcagatatctaaggagtgctttgaaatgaaagatgaactaaaatctgctctgaggcccgtgatttttcaccagtgaaggactctcttgctgctggacatacatgaaaagcatcatctgatctgaaacgcaagtccctgcaagacagaggagagactttataaacattttataccattctatgaaatcaattcgattcagggctagaattcaagaagtaatccatgggcaagtatatctgatggtaaacccaaacgattatattgttaacctcttgtactttttttaattttttattatttgatattattatcacaaaagtcgctggaacaggatccatgagctgcttcttcactgcttagtgttttcagaagctgatggattattaagctccaattgaatacttgatttccaatgattccattaatttttctggtttgtggtaggatttgatttacttattttgtactttaacacaccaataaaaaatagatactaagaaatagtgaaatttgttgcttcaaaataacccttaaaatttagagtttagtgaaattaagcaattcaaatagagaaacgattatccttcatttccttaaggcacagaaattgagactaggttcaagaaccttcatattttaaaaactggaaaatactggctaagtgaggactgggcggtcatcctccacacatgctctgtgtgcttggagcgaagaggggaacgcactgaatgagatgaactggaaggaggtgcagcagcgaaggaaatccttctgttgggagagttcacgtgtttaggataatccttcgaataggacgcaacagtgatgtgaggagaagctttggagctgatttagattgagacagtctatcacaggctgtttggttgcatccctttggggccagtctcattttaggtctaaatatgcaggaatggggctctggcttccagaagtttcaggctgcaaaaggctggggccaccatctttacagataatccattagtttgattctcttgggggccaggaagaaaaccaagaacactcaatggactatgggactcaaataatccacaggaggcgtttgtaaaggggcaaaactgtgtgtgcccagtaattcttggagctcgcaatagaggtggagaagcagtgatgggccccacagcagcaggggcttgggaatgacggaaaagaacaaaatgatggaaggacagctggaagaaacagggaagcttccttttaactggatgctgggtctcagccttgaatagttcctggccttcggaggccttttctcagggagcatggcctggggactccctgcttgctctgctgagctttcagggaaggagaaatgggcaaggccagaggcgaccatcaggtgctccgtaggcacagaggcagaactcaaggtttagctttaccttaagagggtgactgcaaagtgtgctccctggaccaggggcctcggcctcacctgggagcttgctaaaaatgcaagttgctctcacccagactgaatctaaaattctgggtacagcccagcaatctctgctcacactttctccagatgattctggtgcaagctaacctttcaaaagtcctgggtcccattcccagaggctgtgattaagttggtctagggctgtggcctagacctggggattttggaagcccacaggtgattctgttgtgcagccatggttggcaggctgttcacggtgctgttcaacaggtcctgctgtgggatggaaagggtctgtatctgcactggccaatgtgggagccagccctgtggctattgagcacttggcccctggctagtgcaactgaggagctgaatttttcatttcatttacttttaattaagtttaaatagctaaatgtggctattgtctgccttattggatagcagagttctagaaccacagataaatgtaatactgtccctttagttgatttaaaaatccaatgcctctgtaatcctagcactttgggaggccaaggtgggctgatcacgaggtcaagagatcgagaccattcttgccaacatggtgaaaccccgtctctactaaaaatacaaaaattagccgggcatggtggcaggcacctgtaatcccagctactcgggaggctgaggcaggagaatcacttgaacccacgaggcggagcttgcagtgagccaagattgcaccactgcactccagcctggtgacagacggagattctgtctcaaaaaaaaatgcctcacagagttaaatatttaagttgataagaaaaatggtagtcgagtctttgaggattattttaaaatccacttttggtgataaatagataaaaacagtgtggtagggcccagaagttcttcctgatttctacctgttggagctgaattcctcaattttacttgtaggagaacggcttcctaaagggcaccttacccagccattcctgcatgcaagtgtgtatgagaactgcagggggcattatatgaaaatccaattcctgggctctatcccagatgttcctatccaataggtctgggttggggccctggaaactgcatttttggcaaaccccttactgatttggatgcacaagtttcaaggaacaggcactaaggatcgctgatgtagaatctgtttgtccatccaggaaagccagagtcaccacacttgagtaaatgggttttgatgtaggaaaggtctttataattctttcatgaattcaccaaactttaaaaactgtactatttttggctgggcttggtggctcacgcctgtaatctcagcactttgggggccaaggcgggtggatcatgaggtcaggagatcgagaccatcctggctaacacggtgaaaacctgtctctacgaaaaatac

SEQ ID NO: 321 - DNA, 4432 bp, Homo Sapiens
attttataataccggagttttgctctatcactgtatcatggacagcaagcttatggaacttattcctcaaaaagtgggacatgctgaaaatacaaacctagcttgagtttagttatgtccctaaatgttaactgatccctgtgggtcagtagggagacagctggcatccgtttccaaccagccaaggatattcggtcgactgtactgactgaccactttgctcaggccgcaagtgtccctcagaaaagcctgaggacttattaaggtcatggaaggttgccttggccaggaactcttttctaatcacatgtttttgacttccctctctagccctaaccggcagccatttgttctctttggtaatcactccacacgagaaaacctgaatgctggcaactttaacttcccttctgaaggacatctggtacgaagcactggtcccggcgggagctttgccaagcacatggtagcccagtgtgtctcaccaaagggacctcttgcttgttcgagaacatacttttttggagctactcatgttccttacttgggtggtgacagcaagctgcccaagaaaactgaacaaatgctattgtcccagatatatgctgctgttattgaggctgttttggctggcattgcatgttatgctaaaacttccagtctaacaaaggccaaggaggtagcagagcaaactctgggatctgggttagattcctttgagttgattccgtttaaggcagccctgcgctccaagatgacttttcatatacatgctgtgaataatcagggaagaattgtaccgctggacagtgaagatagcttatcctttgtgaagacggcttgtatggccgtctatgacattcctgacttactgggaggcaatggttgtttaggatctgtggttttctctgaatcatttttgacttctcagatcttagttaaagaaaaggatggcactgttaccacagaaaccagctccgtagtcctgactgctgctgtacccagattctgctcctggctggtggaagataatgaagtaaaattgtctgagaaaacccagcaagcagtgaggggggatgagtctttcctgggcacttatctaacaggaggagaaggagcatatctttattccagcaatctacagtcctggcctgaggaagggaatgttcatttcttctctagtggccttctgttttctcactgtcgtcatagaagtatcatcatttccaaggatcacatgaattccatttccttctatgatggggattccaccagtactgttgctgctcttctcatagacttcaaaagctcattgcttcctcacctcccagttcatttccatggatcaagcaattttctgatgattgcccttttccccaaatcgaagatataccaagcattttactcagaggtcttctccctctggaaacagcaggataactcagggatctctttaaaagtgatccaggaagatggattatctgtggaacaaaagagattgcactccagtgcacagaagctcttcagtgccctgagccagcctgctggggagaaacggagttccctaaagttactctcagccaaactcccagagctggactggtttctccagcatttcgccatcagcagcattagccaggagcctgtgatgcggacccatcttcctgtgctgctgcagcaagctgaaatcaacactactcacagaatagaaagtgacaaggtaattatcagcattgtaaccggcctcccaggctgtcacgctagcgagctctgtgcttttctggtcactctgcataaggaatgtggcagatggatggtgtatcgccaaatcatggacagctctgaatgttttcatgctgcacacttccagagatacctttccagtgccctagaggcccagcagaaccgctctgcgcgccagtcagcctacatccgcaagaagaccagactgctggtggtgttacaaggctacacagatgttattgatgttgtccaggccctgcagacccacccagactcaaatgtcaaggcctccttcaccattggtgccatcacagcatgtgtggagcccatgagctgctacatggagcacagatttctctttcctaaatgtcttgaccagtgttcacaaggcctggtgagtaacgtggtattcaccagtcacaccacggagcagcggcaccctctccttgttcagctgcagagcctcatcagggctgccaatcctgctgcagccttcattcttgcagaaaatgggattgtcaccaggaatgaagacattgagctgattctctcagaaaacagtttttcaagtcctgagatgctacgatctcgatatttaatgtatcctggctggtatgaaggtaaattgaatgctggatcagtctatcccctaatggttcagatctgcgtatggtttggccgtcccttggagaagactcgctttgtggccaaatgtaaagcaattcagtcctccatcaagccaagtcccttctccggaaacatctaccacatcctgggcaaagtgaagttttcagactctgagaggaccatggaggtctgctacaacacactggccaactccttgagcatcatgccagttttggaaggacccacaccaccaccagactccaaaagcgtatctcaagacagcagcgggcagcaggagtgctaccttgtgttcatcggctgctccctgaaggaagacagcatcaaggactggctgcggcagtcagctaagcagaagcctcagaggaaagccctgaagaccagggggatgctgacgcaacaggagatcaggagcatccacgtaaaacgccacttggaacccctacctgcaggctacttttataatggcacccaatttgttaacttctttggtgacaaaactgattttcacccactcatggaccagttcatgaatgactacgtggaagaagccaaccgggaaattgagaagtataaccaggagctggaacagcaggagtatcatgacctctttgagctgaagccctagaggaaggctgggcccgtacgtcctgcagaatgtccaccttggagatggacgaacgggtgtcttaacctcagctctgctggaggcctctcccttaaggggctgtctttgttctccttggcctgtgtgggctggcttgagtgcatgttgtctttattccctgtatagcgctgaagagcatcacctgcaccattgattttgggggtcgggggaatactcaaggatgagcagatggggcctgcccgtctacgtgtgcaactggcagtccaggagctctgggtttctgataacaggatctcctttgggctcttgaggttggggagaagcattaggattacacagaggagctactgggacttagaaggaaccctggctgcctgaactgtggccgtgtctgggaggcgaggccacgacaggcctcaagcctcagatgctgctccacgagagccatcttccccagtggagtgcctgcctcccctgctaggcccgtttccctgaaggagctggccgtactggccgtgggcccagtcctgggaggagcagcacagccttgcccaggcccagtccacagagccagcagcttgggttgagatgaatgatgtgttcacaaatgaggggatttcccttctggactaaactgaaggagaggcttgttgctttccagaggtgtgtggctcttaagttgacatcagcttttccccttgtgggtggttctttagctctcctgtcacaccattcgggtgtcctaatgtagggacaagagcaagcctgctgctcaggccccctggcgaggcttcacctcactgtggaagggggcgtcctgcagctggttagtcttaggcctggtggctgatcacttgtggggtcagtctccagcacccagcgctcccacaagccttgccaaggaaggcctgcttttcagccacaaacttcaggaaactcatccccccgctccccaaagtgttgttgctggccctgggcttgtgtggctcctgaggattgggaatttcaaataattgcaatacctgagttagaattccttctaatggcatcgttttaagctggaccataaagcagaggggaattacaagtgtgtcccatgcctgaccttcataattggtgtgggggacaggggagtcacagccactgatatttaggtgatgtctcttaggacttcagtgcctcagctgcctgaactgtaaatgttttctgaatttcacatatttttttttgcatgccttaggaagaagcacataggtaaaaccagcagtttccagtaatatagggggtttttgagcaaggcccctggagcagcggagagacaagatggagcacatgtagtctgtgtgcctggtcacacagaggcctgcatgcaagtagcaaagcagctctcaagggcttgtcagtaaaatatattag

SEQ ID NO: 322 - DNA, 464 bp, Homo Sapiens
ctccccagcctgataaaggtcctgcgggcaggacaggacctcccaaccaagccctccagcaaggattcagagtgcccctccggcctcgccatgaggctcttcctgtcgctcccggtcctggtggtggttctgtcgatcgtcttggaaggcccagccccagcccaggggaccccagacgtctccagtgccttggataagctgaaggagtttggaaacacactggaggacaaggctcgggaactcatcagccgcatcaaacagagtgaactttctgccaagatgcgggagtggttttcagagacatttcagaaagtgaaggagaaactcaagattgactcatgaggacctgaagggtgacatcccaggaggggcctctgaaatttcccacaccccagcgcctgtgctgaggactccctccatgtggccccaggtgccaccaataaaaatcctacagaaaattcaaa

SEQ ID NO: 323 - DNA, 1872 bp, Homo Sapiens
attccgggctcgaaggctgtgcggtctgccaggagctgcggccccgtccggcccgggctggcatgggttggaattggagcctatcccccaacccgaaggctaacagcatcatgtggttactaactgttcctcattcaccggttgatgcctcccagaaaaaaacgccgccagccttcccagaaagccccgctgctgttccaccaacaaccactggagggccccaaacacagctgtgcatctacacagcttcccatcactcacactcgacaggtgcccagcaagcccattgaccacagcaccatcacttcctgggtatcacctgattttgatacagcagcaggaagcttgttcccagcctaccagaaacaccaaaaccgggcgagacactcaagtcgaaaacctaccacctccaagtttccacatctaacttttgagagtccgcaatcttccagttcagagacattggggatccccttaatccgagagtgccccagtgaatcagaaaaggatgtttccagaagacccttagttccagtgctcagtccccaaagctgtgggaacatgtcagtgcaggcacttcagagcttaccttatgtgttcattccacctgatatccagaccccagagtcatcgtctgtgaaggaagaactcattccccaagatcagaaggaaaacagccttctaagctgcactcttcacactggcactcctaatagcccagagcctggacctgttctggttaaagacacccccgaggacaagtatggaataaaggtcacatggaggagacgacagcacctgcttgcttacctcagggagagagggaagctgagcagaagccaattccttgtgaaaagctgactgccatcagtaatctcaatagaaaagagatatgttttctggagtcataaaggaattcaattcctagggtttttgtttttgtttttgagatgtaatattgctctgttgcccaggctggagtgcagtggtatgatctcaccttactgcaaccaccacttcctgggttcaagcgattctcctgcctcagcctccccagtagctgggattacaggcaccagccaccatgcctggctaatttttttgtatttttagtagagatgtggtttctccatgttggccaggctggtctcaaaatcctgacctcaagtcatctgctggccttgacctcacaaagtgctggcccagccgagatttgttttctaagatactttgtgtcatgaacagttcagtttagtgtcatgaactattcacttcatatttttcttgtattaactgtttaaatttttaaaatatcttgtagtaactctttaaaatgtatgtaagtaaatggctgcagaaagtttttttagagaatcctgcttccatcagtaatacagcaatattaccccatccactaatggtctttgtttccttaaccactactcattaatccttaatcacctcattcaaactaattcattctgcatttttgagtaccaactcttgtcaggctcagtggcagcttctacgacctgatggatggaaaaaaatcaaactctgtgactctatggttgactgccacctctgcaaccttgactcatctgctgaaaaggcaagaagaagaaagggcagcaagccctgttttagggactacataagatgaggggagataagggggacatagatgagttctttaggattgcgtgtgttttgagtttttgtttctaactgaagaaatctgtcaatattaaatagggtgggaaaatggtttcttagaataactgttcaactgtgtgtaaataaggaaagttttcaatgagtattacttattgtaattaatgcagaaggacttccccagtcaaaaaaaaaaaa

SEQ ID NO: 324 - DNA, 7375 bp, Homo Sapiens
tctgcttatcatggttaccaacaaaatgactgctgcctttagaaaccctagtgggaaacaggtggcgacagacaaagttgcagaaaagctgagctctactctctcatgggtgaagaacacagtatcgcatacagtcagtcagatggccagtcaggtggcaagtccatctacttcattacataccacatcctcatctaccacactatcaacaccagccctttcaccatcttccccatcacagttgagtccagacgacttagaactcctggctaaactggaagaacagaatagattgttagaaacggatagtaagtctttaagatctgtaaatgggtcaagaagaaacagtggctcttctcttgtgtcgagttcatcagcctctagcaacctcagtcaccttgaagaagattcttggattctttggggaagaattgttaatgaatgggaagatgtacgcaaaaagaaggaaaagcaagttaaggaacttgttcataaagggataccccatcactttagagcaatagtttggcaacttttatgcagtgcacaaagtatgccaattaaggatcagtattcagaactcctgaaaatgacctcgccttgtgaaaaattgatccgaagggacattgctagaacttaccctgaacacaacttttttaaggaaaaagatagccttggacaggaggttttatttaatgtaatgaaggcttactctttagtagatcgtgaggttggttactgtcaaggaagtgcttttatagttggattgttgcttatgcagatgccagaagaagaagctttctgtgtatttgttaaattaatgcaagattatagacttcgtgaactttttaaaccaagtatggcagaattgggcctttgtatgtaccagtttgaatgtatgatacaggagcatcttccagagctctttgtacattttcaatctcagagttttcatacctcaatgtatgcatcatcctggtttctgactatctttcttacaacttttccactaccagttgcaacaaggatatttgatatctttatgtctgagggtttagaaatagtgtttcgtgtaggattagcacttcttcagatgaatcaggcagaactgatgcaacttgacatggaagggatgttacagcactttcaaaaggtcattccacatcagtttgatggtgtcccagacaagctaatccaagcagcttaccaagtcaaatacaattcaaaaaaaatgaaaaagcttgaaaaggaatacactacaataaaaacgaaagaaatggaagagcaagttgaaattaaaaggttacgcacagaaaatagacttttaaaacagcgcatcgagacattagaaaaacataaatgcagttccaactacaacgaagattttgtgctacagctagagaaggaattggtccaagcccgactgagtgaagctgagtctcagtgtgcattaaaagagatgcaggataaagtcttggatatagagaagaggaataactcccttcctgatgagaataatattgcaaggcttcaggaagaactcattgctgtgaaacttagagaagcagaagccattatgggtttgaaagaacttagacagcaagtcaaggatttagaggaacactggcagcgccacttagctcgtactactgggagatggaaagacccacccaagaaaaatgctatgaatgagttacaggatgaactgatgaccattcgacttagagaagctgaaacacaagcagaaataagagaaataaaacaaaggatgatggaaatggaaacacagaaccagatcaatagtaaccatcttcgaagagcagaacaagaggtgattagcctacaggagaaagtgcagtatctttctgcacagaacaaaggactccttactcaattaagtgaagcaaagcgtaaacaagcagagattgaatgcaagaataaggaagaagtgatggctgtgaggcttcgggaagcagatagcatagctgctgtggctgaactacgacaacacattgctgagcttgaaatccagaaagaagaaggaaagcttcaaggacagcttaacaagtctgattctaaccagtatattggggaactgaaagatcagatagcagagctgaatcatgagctcaggtgcctaaaaggccagaagggcttctcaggccaacctccttttgatggaatccacattgtcaaccatttaataggagatgatgaatcattccattcctccgatgaagattttatagataattccttacaggaaactggtgttggttttcctttgcacggaaaatctggctcgatgtctttggaccccgcagtggcagatggtagtgagagcgaaacagaagacagtgtgctggagaccagagagagcaaccaagtggttcaaaaggagcggcccccgagaagaagagagtcgtattcaaccactgtctgaccatcactgtgacctagactatggatttatttaagggatcagttatcatatgattagggctttttggaaataatttgtttcatatgtatatatatatatatatatatatattttacagtcttatctgcctttttatctttgccaaatctttaccactgatttaccattgccataaagtagactggtatatggttaatgtgtaaaacaaggttctaacagtattactgaatattaatgtttcttgtttagaaaatgcaactatatctatatgtgggaaccattctgaagttcaaaactatggaaaattgaattttcttcagacaaaactgctcttgtgcaatattttatgctcagtgagcaaattgtgtatttatgtttatcaatttgttctcaaggtggctgtctacagacatttgaccaagacatacatctgatttaccttgtgtttttttttttattgttgtttttttttttaagacagagattcagtctgtcacccaggctggagtgctgtggtgtgatcttagctcactgcaacctccgcctcccaggttcaagcaattttcctgcctcagcctcccgagtacctgggactatatgtgcgcaccaccacgcctggctaattttttgtatttttagtagagatggggtttcaccatgttggctgggctggtctcgaactcctaacctcaagtgatccacccgcctcagcctcccaaagtgctgggattacaggtgtgagccactgcacccagcctaccttgtctgtttgtgtctgggaggttttttttttctatttttattttttcatgaaaattattggtgggccactgaaagtccccacacacaaagcctttattctatataattttataaacacaaattcatgattatctgttttgagagttttaagttttgttttaatgtttaacttttatgtgcatatgatgcttccatgtgttggttactagagtagtaggttaactacagacatactgttttgtttgtacatatttataaatctgtaccacctaacattgaacatcattttatatgaagaacatacatgttgcaaaatgactgctttcagcatctaacaggacttctgtaaataataggttaaaagttaaaaataaaacactaatgttttaagagctttagtattttgcttagcattcaatactagcagattcataactgatgcctgttcaaaaacactgttggtggaatcttttatttcatgtgtatgtaactactaaatttttcatgactgaagaggttatagcacatattagttagtgctaatattctactgaatataatttaagcaatgggctaaggtccaagaaacatagcaattatatctacaaataatctattaacatgatcttcagaatctctagtttttgttctatagataaagccataagaatcctttcctaccagtttttcctatatcatttagatattatttcctagaaaacaggatgcctgtcactgataagttagagaaaacacccaaattatacttgcactatggaaagacgacatgaatatgttgactgggtactttctactctcatttttgttagcctatgaaaaaaaaaacattttgttaacctatggaaaaagccttggaagagaaaagtagaattcagtatgtatggaggcacagttttgcacagtatgttgcatgcggcaaaaaaaaaaatatgaaatagagtagaagagataaaagtagttttctgtcaaaaactaggagttaagccttcaggtacgttgtggactaggctttccagcaaggtttttgtagctatttgcttgcctgagaaatgaaattgaaaacatacccctgcgtgtctgtccttaacaccaggctaaattctggtggttaaataacttatctgtggttacaagctagtaagtagcagagccaagattttttttaatatagagacaggtgtctcactgtgttgtccaggctggtcttgaactcctggcctcaagtggtcctcctgcctcagcctcccaaagtgtggggattacaggtgcgagctactgctcccagcaagagccaagattttaacctagatctccctaacaccaaagcttttgaaagggttcagctgaagaatttctcaattctctgttttgttttgtttttatttttgttttttgagatgaagtctcactgcactcaggctggagtgcagtggtacgatcttggctcactgcaacttccacttcccgggttcaagcgattctcctgcctcagctcccaagtagctgggactacaggtgcacgccaccacaactggctaatttttgtatttttagtagagatggggtttcgctatgttggccaggctgatctcaaacttctgacctcaggtgatccacccactttgacctcccaaagtgctgggattactagacgtaagccaccacacctggcaattccctgcttttttgacaacataatttaaatgaatttgatttaaatgtttcctgaatatatatacagatagatagatgagtatcaacacttacaagctctacacagtctgtgagtgtagatactacttactcgtaggattgtcttgtgctttggggatttttgttcggagttctatactatcagcccagaaagctatcaatgtccaagtgaagtgagatgatgcatggccacattattgctttgaccctcacatcaagaaatctgaatgatctggaccaggggtcagcaaagtgcagcctacaagctattgcagtcagctgccagtttttacttttttaaatagttgggaaaaaaattccaaagactgatattttgtgtcacatgaaaattatatgaaattcaaattgcagtgtccataagtaaagttttattggggcacacccatgctcacccttttaaatattgtgtatggccgctttgtgctacagtagcagagttgagtcattgcaagggagaccatatggcccaggtagcctaaaatatttatctgatcctttacagaaaaagtttgctaacccttgataacagatactctaaaatgcaggtttttcttcttcaatttagctcagtggtaggtcaaattgtttgcttttgctattaagcttatgatttggaaacgtaaaatttcatggtggatcttataatcagaactattcaaaagggaaaacatgccagccattttatatgatgaagtctcttattccatagaaaactgtagaaagatatctgtatctttggagaaggagaaagaaaggaaagaactccagaatcccatcactgttctttaaagcatgcatcacagacctttaagagtatgctttattgagtaaaggttatagtttgactttaagataagaaattttctagaatcatgtttgaattctaaacgttgatattcttaagtaccatttctgattaggaattaggtgttaaaagaatcatggtaaggaaaccttaatccgttgaaactcttgtaatttggacaacaaaaaactagaaataacactcttttctttgaagatctgattcaaatacaccttagaagagtttaaaatctcccaggcctttaggatgcaataggatattatgccttggtttgactccttttcattcaaattaatgtaagtatgttgttcaagactttgaagcattgaacaatgttctcgatgaattttatttaattactgacattttgtgatatttgaatgttattaagttaaacacttagagttgagtatattcaggggagaaaagtgaatgaaatgactcataataagaaagcttgctcccttgggacagttaccttcctggtgtcattgccatcctgggttgacaagctgagagtagaggatacaagtgatgtgaataaaatggaaattgcattgagttaatgaaacagacacttttagatcaagaaaacacttcaacagcctttttagaaattggcacactcctatagtcccacctactcaagaggctgaggcaggaggatcactagagtacaggagtttggggctgtagtgtgtaatgatcacacctgtgaaagaataaccactgcactccaacctgggcaacatggcaagaccctgtctctttaaaaaaaaaaaaaatcctgggaaaagaagtcaaagatgtaattttacacaatttctgcccccaccgtcttttttgtttgtttgtttgtttgtttgttttttggctagatactaggtattcagtgtttgctgagatgacaggtttctactaatcagccagttatttgggaaggagaaaaactttttctcaattctgaacatgatgcagcttgttaactctccagatagtgcctttgattgaaaataaggtctacacctttttaagtatattatttctgacatcgtaagaaataatttagttccttattctcatttatcttttatataatgtactgtaatattcaggtttaaagtaaaataagtatatgaattatattttggtaaaactgtttcatgaccagcttgattaatgtatattaacataccagacattgacagcgaacatttcatgaaatcagttatttacttaccaaaacaatgagttttagcttgaaagttactgctgctctattattaacaaaactaagttttaaaaattaattttaattctactgaagtttaatttctggttaaaggtatagtggatgctatttatgatccaagtttttacatcacatccattgatctgcctatcccttctttttactccaaagaggagatgatagaataatacattcagtatactaccaagaagcaaagttataatgtgtttcattttgctattggaattttttattgtaacattgtatgataacctgaaatgtttacttgtgccttttctttaaacaattaaagttttccattttataagaaaaaaaa

SEQ ID NO: 325 - DNA, 4073 bp, Homo Sapiens
gcagaggcggaggctcgcgtattcctgcagtcagcacccacgtcgcccccggacgctcggtgctcaggcccttcgcgagcggggctctccgtctgcggtcccttgtgaaggctctgggcggctgcagaggccggccgtccggtttggctcacctctcccaggaaacttcacactggagagccaaaaggagtggaagagcctgtcttggagattttcctggggaaatcctgaggtcattcattatgaagtgtaccgcgcgggagtggctcagagtaaccacagtgctgttcatggctagagcaattccagccatggtggttcccaatgccactttattggagaaacttttggaaaaatacatggatgaggatggtgagtggtggatagccaaacaacgagggaaaagggccatcacagacaatgacatgcagagtattttggaccttcataataaattacgaagtcaggtgtatccaacagcctctaatatggagtatatgacatgggatgtagagctggaaagatctgcagaatcctgggctgaaagttgcttgtgggaacatggacctgcaagcttgcttccatcaattggacagaatttgggagcacactggggaagatataggcccccgacgtttcatgtacaatcgtggtatgatgaagtgaaagactttagctacccatatgaacatgaatgcaacccatattgtccattcaggtgttctggccctgtatgtacacattatacacaggtcgtgtgggcaactagtaacagaatcggttgtgccattaatttgtgtcataacatgaacatctgggggcagatatggcccaaagctgtctacctggtgtgcaattactccccaaagggaaactggtggggccatgccccttacaaacatgggcggccctgttctgcttgcccacctagttttggagggggctgtagagaaaatctgtgctacaaagaagggtcagacaggtattatccccctcgagaagaggaaacaaatgaaatagaacgacagcagtcacaagtccatgacacccatgtccggacaagatcagatgatagtagcagaaatgaagtcataagcgcacagcaaatgtcccaaattgtttcttgtgaagtaagattaagagatcagtgcaaaggaacaacctgcaataggtacgaatgtcctgctggctgtttggatagtaaagctaaagttattggcagtgtacattatgaaatgcaatccagcatctgtagagctgcaattcattatggtataatagacaatgatggtggctgggtagatatcactagacaaggaagaaagcattatttcatcaagtccaatagaaatggtattcaaacaattggcaaatatcagtctgctaattccttcacagtctctaaagtaacagttcaggctgtgacttgtgaaacaactgtggaacagctctgtccatttcataagcctgcttcacattgcccaagagtatactgtcctcgtaactgtatgcaagcaaatccacattatgctcgtgtaattggaactcgagtttattctgatctgtccagtatctgcagagcagcagtacatgctggagtggttcgaaatcacggtggttatgttgatgtaatgcctgtggacaaaagaaagacctacattgcttcttttcagaatggaatcttctcagaaagtttacagaatcctccaggaggaaaggcattcagagtgtttgctgttgtgtgaaactgaatacttggaagaggaccataaagactattccaaatgcaatatttctgaattttgtataaaactgtaacattactgtacagagtacatcaactattttcagcccaaaaaggtgccaaatgcatataaatcttgataaacaaagtctataaaataaaacatgggacattagctttgggaaaagtaatgaaaatataatggttttagaaatcctgtgttaaatattgctatattttcttagcagttatttctacagttaattacatagtcatgattgttctacgtttcatatattatatggtgctttgtatatgccactaataaaatgaatctaaacattgaatgtgaatggccctcagaaaatcatctagtgcatttaaaaataatcgactctaaaactgaaagaaaccttatcacattttccccagttcaatgctatgccattaccaactccaaataatctcaaataattttccacttaataactgtaaagtttttttctgttaatttaggcatatagaatattaaattctgatattgcacttcttattttatataaaataatcctttaatatccaaatgaatctgttaaaatgtttgattccttgggaatggccttaaaaataaatgtaataaagtcagagtggtggtatgaaaacattcctagtgatcatgtagtaaatgtagggttaagcatggacagccagagctttctatgtactgttaaaattgaggtcacatattttcttttgtatcctggcaaatactcctgcaggccaggaagtataatagcaaaaagttgaacaaagatgaactaatgtattacattaccattgccactgatttttttttaaatggtaaatgaccttgtatataaatattgccatatcatggtacctataatggtgatatatttgtttctatgaaaaatgtattgtgctttgatactaaaaatctgtaaaatgttagttttggtaattttttttctgctggtggatttacatattaaattttttctgctggtggataaacattaaaattaatcatgtttcaaagttttattttcagttccttttgcatgcctattttgatttagaaatcactttaagataaatgaacaaaattattgtaagtcttctaaacttggtttattgacgttagtataaataacatacaataccagatgtctacaaaatcgacctgattatttaggtatttgtatgtgaaagagaaacacatatttagaaacacagcaagggagattttgaataaagagagagatgaatttataaagtaggaaaaaaagaatctgaaagatacaaagtgattataaaagaattgacaggacaataaatacttcaaatactttcaggaagtaaatgagtaggagtttaggagggataaacgagataaattccatgcaatgatcaaggaaagcaagagagcagataatacaaaagaaaaagaagaaggttcacataaatagcttctggagtgcaaattataaagacatcaacatttttgatcatataataagtactggcttacagctaagtggttccaaatactggtaattaaaacgatgtatacgttaaagattgcaaaacttaaaagcagatttttatgggaactttttttgaaaggatacatgaccaccttcttaaatagtatgactttacatagactctttttctggtccttactgctcctcccacaacagggaagcccgatcagttctgtcagtataaggttttcttctatttgcccttagtttagatctccatcatcaattccacttactattgtaataccttcagctggagcctgtgtctttctccattcctttttaatacattcgtatttcccagccccagaacccttgaaattaactcttccatgagttttcattgctgaagaaaaaccaaacattcttgtaaaaacatttaagaacttccatagtcttgttcatattgtttacctatcttctacacaaggcgtgtccttgggtaagttatttaacttcaatttaccttacctgtaaaatggaacaaataatatctccttaagattgctctacgaattaattgacacattatgtgtgatgtacttaaaggaataataaatgcataatatgaggtcagtggacgccattttctgttataatcatttttgttatctaatttggggaaactattcatctgtcatatactattgatcctttggcacttaaataaatgtgaaatcctccaggaattttcctgtgattctccttgtaagaattaaatgctctctaatatgatatccctttaaaaaaaaaaaaaaaaa

SEQ ID NO: 326 - DNA, 2002 bp, Homo Sapiens
gattgtgggaaggcagctgaactcggcgcctggaaagatggaggcagcggagacagaggcggaagctgcagccctagaggtcctggctgaggtggcaggcatcttggaacctgtaggcctgcaggaggaggcagaactgccagccaagatcctggttgagtttgtggtggtatgtacaagatgagagcgagcctttcagaagccagggtctggtcctggctcctcttactgagatacagggcagcattggcagagagcagacttaaggaaacctgtaaggaggtaaggatgttccctgtctctgccctccctctgagcaggactctcagaagaaagacaagctgctctgcagccagcttcaggtagcggatttcctgcagaacatcctggctcaggaggacactgctaagggtctcgaccccttggcttctgaagacacgagccgtgagtaggcaggggattgtagtagcagctgacctgagtggggaaggaaggaggatttcagttaggtctcccatttggctgatgggaaggaggcccagtgttgcagggaggcaggctagcaggccaccctcactcatgtactcattcctggtggctcatctcaggacagaaggcaattgcagctaaggaacaatggaaagagctgaaggccacctacagggagcacgtagaggccatcaaaattggcctcaccaaggccctgactcagatggaggaagcccagaggaaacggacacaactccgggaagcctttgagcagctccaggccaagaaacaaatggccatggagaaacgcagagcagtccagaaccagtggcagctacaacaggagaagcatctgcagcatctggcggaggtttctgcagaggtgagggagcgtaagacagggactcagcaggagcttgacagggtgtttcagaaacttggaaacctgaagcagcaggcagaacaggagcgggacaagctgcagaggtatcagaccttcctccagcttctgtataccctgcagggtaagctgttgttccctgaggctgaggctgaggcagagaatcttccagatgataaaccccagcagccgactcgaccccaggagcagagtacaggagacaccatggggagagaccctggtgtgtccttcaaggctgttggtctacaacctgctggagatgtaaatttgccatgacttcctggaggacagcagcatggagaaagatcctagaaaaggcctctgacttccctcacctcccaaccatcattacaggaaagactgtgaactcctgagttcagcttgatttctgactacatcccagcaagctctggcatctgtggattaaaatccctggatctctctcagttgtgtatttgttcatcttcatatgctggcaggaacaactattaatacagatactcagaagccaataacatgacaggagctgggactggtttgaacacagggtgtgcagatggggagggggtactggccttgggcctcctatgatgcagacatggtgaatttaattcaaggaggaggagaatgttttaggcaggtggttatatgtgggaagataattttattcatggatccaaatgtttgttgagtcctttctttgtgctaaggttcttgcggtgaaccagaattataacagtgagctcatctgactgttttaggatgtacagcctagtgttaacattcttggtatctttttgtgccttatctaaaacatttctcgatcactggtttcagatgttcatttattatattcttttcaaagattcagagattggcttttgtcatccactattgtatgttttgtttcattgacctctagtgataccttgatctttcccactttctgttttcggattggagaagatgtaccttttttgtcaactcttacttttatcagatgatcaactcacgtatttggatctttatttgttttctcaaataaatatttaaggttatacatttaaaaaaaaaaaaaaaaaaaaaaaaaaa

SEQ ID NO: 327 - DNA, 2845 bp, Homo Sapiens
ggcctcgagggacaggacgtgaagatagttgggtttggaggcggccgccaggcccaggcccggtggacctgccgccatgcaggacggtaacttcctgctgtcggccctgcagcctgaggccggcgtgtgctccctggcgctgccctctgacctgcagctggaccgccggggcgccgaggggccggaggccgagcggctgcgggcagcccgcgtccaggagcaggtccgcgcccgcctcttgcagctgggacagcagccgcggcacaacggggccgctgagcccgagcctgaggccgagactgccagaggcacatccagggggcagtaccacaccctgcaggctggcttcagctctcgctctcagggcctgagtggggacaagacctcgggcttccggcccatcgccaagccggcctacagcccagcctcctggtcctcccgctccgccgtggatctgagctgcagtcggaggctgagttcagcccacaacgggggcagcgcctttggggccgctgggtacgggggtgcccagcccacccctcccatgcccaccaggcccgtgtccttccatgagcgcggtggggttgggagccgggccgactatgacacactctccctgcgctcgctgcggctggggcccgggggcctggacgaccgctacagcctggtgtctgagcagctggagcccgcggccacctccacctacagggcctttgcgtacgagcgccaggccagctccagctccagccgggcaggggggctggactggcccgaggccactgaggtttccccgagccggaccatccgtgcccctgccgtgcggaccctgcagcgattccagagcagccaccggagccgcggggtaggcggggcagtgccgggggccgtcctggagccagtggctcgagcgccatctgtgcgcagcctcagcctcagcctggctgactcgggccacctgccggacgtgcatgggttcaacagctacggtagccaccgaaccctgcagagactcagcagcggttttgatgacattgacctgccctcagcagtcaagtacctcatggcttcagaccccaacctgcaggtgctgggagcggcctacatccagcacaagtgctacagcgatgcagccgccaagaagcaggcccgcagccttcaggccgtgcctaggctggtgaagctcttcaaccacgccaaccaggaagtgcagcgccatgccacaggtgccatgcgcaacctcatctacgacaacgctgacaacaagctggccctggtggaggagaacgggatcttcgagctgctgcggacactgcgggagcaggatgatgagcttcgcaaaaatgtcacagggatcctgtggaacctttcatccagcgaccacctgaaggaccgcctggccagagacacgctggagcagctcacagacctggtgttgagccccctgtcgggggctgggggtccccccctcatccagcagaacgcctcggaggcggagatcttctacaacgccaccggcttcctcaggaacctcagctcagcctctcaggccactcgccagaagatgcgggagtgccacgggctggtggacgccctggtcacctctatcaaccacgccctggacgcgggcaaatgcgaggacaagagcgtggagaacgcggtgtgcgtcctgcggaacctgtcctaccgcctctacgacgagatgccgccgtccgcgctgcagcggctggagggtcgcggccgcagggacctggcgggggcgccgccgggagaggtcgtgggctgcttcacgccgcagagccggcggctgcgcgagctgcccctcgccgccgatgcgctcaccttcgcggaggtgtccaaggaccccaagggcctcgagtggctgtggagcccccagatcgtggggctgtacaaccggctgctgcagcgctgcgagctcaaccggcacacgacggaggcggccgccggggcgctgcagaacatcacggcaggcgaccgcaggtgggcgggggtgctgagccgcctggccctggagcaggagcgtattctgaaccccctgctagaccgtgtcaggaccgccgaccaccaccagctgcgctcactgactggcctcatccgaaacctgtctcggaacgctaggaacaaggacgagatgtccacgaaggtggtgagccacctgatcgagaagctgccgggcagcgtgggtgagaagtcgcccccagccgaggtgctggtcaacatcatagctgtgctcaacaacctggtggtggccagccccatcgctgcccgagacctgctgtattttgacggactccgaaagctcatcttcatcaagaagaagcgggacagccccgacagtgagaagtcctcccgggcagcatccagcctcctggccaacctgtggcagtacaacaagctccaccgtgacttccgggcgaagggctatcggaaggaggacttcctgggcccataggtgaagccttctggaggagaaggtgacgtggcccagcgtccaagggacagactcagctccaggctgcttggcagcccagcctggaggagaaggctaatgacggaggggcccctcgctggggcccctgtgtgcatctttgagggtcctgggccaccaggaggggcagggtcttatagctggggacttggcttccgcagggcagggggtggggcagggctcaaggctgctctggtgtatggggtggtgacccagtcacattggcagaggtgggggttggctgtggcctggcagtatcttgggatagccagcactgggaataaagatggccatgaacagtcaaaaaaaaaaaaaaaaaaaaaaaaaaaaaaaaaaaaa

SEQ ID NO: 328 - DNA, 1790 bp, Homo Sapiens
taaatgaagtaacagcaaaatagcgcagcatctcagctgttccaggttcctcaaataagttttacttttgcaaaaccaacctcaaacttcctatattctctgttctgcattataagcaacatgaccagcagccacgtttgttgtaattttttaaatatgtggaaaaaaagcaagatatcaaccatgtattaccttaaccaagatgccaaattatctaacttgtttctccaggcaagcagcccaacaacagggacagctcccaggagccagtcaaggttgtctgtctgtccatccactcaggacatctgcagaatctgtcactgcgaaggggatgaagagagccccctcatcacaccctgtcgctgcactgggacactgcgctttgtccaccagtcctgcctccaccagtggataaagagctcagatacacgctgctgtgagctctgcaagtatgacttcataatggagaccaagctcaaacccctccggaagtgggagaaactacagatgaccacaagtgaaaggaggaaaatattctgctctgtcacattccacgtaatcgcgatcacctgtgtggtttggtctttgtatgtattgatagaccggacagcggaggaaatcaagcaaggcaatgacaatggtgtccttgaatggccattttggacaaaactggttgtggtagccattggcttcacaggaggtcttgtcttcatgtacgtacagtgtaaagtctatgttcagttgtggcgcaggctgaaggcctacaaccgtgtgatctttgtacaaaattgcccagacactgccaaaaaactggagaagaacttctcatgtaatgtaaacacagacatcaaagatgctgtggtagtgcctgtaccacaaacaggtgcaaattcactgccatctgcagagggtggcccccctgaagttgtatcagtctgatggaacctgttgggagtttcttcaccgaagaatatctttctagccctcagccactacaaatgacagaagtgatcttgaattatttactcccttcagctcctcctttctcctactgacacatttttcctgactttgttcaaagaggaaaggagaaaaacaaacagaccaaatgcccaggagcccatgaagtaatagcgtaaagtaaagtatgatatggaaatgtgaagtttgcaagagaatgatttccaagacaattaagaactactggggcaatgaatgcttttaggcagtaatcaaagattaaatggacccatgatactcttcttcacagtaacaggggaaaagttcaagaatacagacttgaattgcgatgtgtattacttctagggccttgtaatgttaactgtctcatctggaaataactaacatatttggttttaagcctgaaattgtctgcattatccctaagtcacattggaagtgaacttggaggatgcatattttgatatgctttgacagctaacagatttgtatggtttagtggagtctggttattttgacagatgcatgttttttttaaatagatgcaatatacatttgaagacattgatatttggaattaattatgtttgtttaagtcacgcaaaagattttcagaaaatgttcggatataattagctctgttaaatacccacagaactgttatcaggtcttatatttattttcatctggttcctctaatacagtgctgtccaatagaaacacaacagccacaaatgcaggccacagatgcaaatatttaacttcccagtagccctattttaaaaagtaaaaataaatgtttgtttgtt

SEQ ID NO: 329 - DNA, 2371 bp, Homo Sapiens
ccggagcctgcggcgggcggctgtgacggccccggcgctgacggcggcggccgggggggcggtgtcgacgcccgcggcgccggctggggcatcaccgcgggcctcgaccccgaaatggcgctgctggccgaacacttgctgaagccgctgcccgcggacaagcagatcgagaccgggcccttcctcgaggcggtgtcccacctgccgcccttcttcgattgccttgggtccccagtgtttactcccatcaaggcagacataagcggcaacatcacgaaaatcaaagctgtgtacgacaccaacccagccaagttccggaccctgcagaacatcctggaggtggagaaagaaatgtatggagcagagtggcccaaagtaggggccacactggcgctgatgtggctgaaaagaggcctccgcttcatccaggtcttcctccagagcatctgcgacggggagcgggacgagaaccaccccaacctcatccgtgtcaacgccaccaaggcctacgagatggccctcaagaagtaccatggctggatcgtgcagaagatcttccaggcagcactgtacgcagcaccctataagtctgacttcctgaaagcgctctccaaggggcagaatgttacggaggaggagtgcctggagaagatccgcctcttcctagtcaactacacggcgaccatcgatgtcatctacgagatgtacacccagatgaacgctgagcttaactacaaggtgtaggcatgcccactgctggacacgtccccgactcgtggccacatggagaaacaggcaaaccagaatcactgtgaatcaagtcggtgaactgcccctggcctgtgtcccccagagcagcccagggtcctgccagagtctgcaggggacagccctcgttttttaagtcttttttttttttttttttggtctattctaaaggaccagtaaataatgatcttacttccaaatctccttggaatttcacgacagcacagactgactttataccttcatttcagcgtggtaaaaaccgattaacacttctaatgagtcaagtcctagggttttttggttttgttttgttgccaacgaggaacacagctctgggggaatggtgtcatccacctcgctttaaaaataagcacatgatggctgggcaccgtggctcacgcctgtaatcccagcactttgggaggctgaggcgggtggatcacctgaggtcgggagtttgagaccagcctggccaacatggtgaaaccccatcgctactaaaaatataaaaaattagctgggcatggtggcgcacgcctgtagttccagctactcaggaggctgaggcaggagaatcgcttgaacccgggaggtggaggttgcagtgagctgagatcgcaccattgcactccagcctgggcaacaagagcgaaactctgtctcaaaaaaaaaaaaaagaggtgggtggattacttgaggtcagggtttgagatcagcctgaccaacatggtgaaaccctatctctactaaaaatatagaattagccaggcatggtagcgcacgcctgtaatcccatcttcttgggaggctgaggcaggagaatcgctagaaactgggaggtggaggttacagtagccgagatcgcgccactgcattccagcctgggcaacaaaagcgaaactctgtctcaaaaaagaaaaaaaagaaaaaaaagcacgtgaccttatgaggctctcgctgtattgttattttaaggactataaagagtttgatttaaaattatgcagggcccctatgtgggattttttaaaaagcaaactggtgtgtattctcatgtggtttgcacagcccagcctcacagcactattgtaaaccctgctctttctgtctcgctagacagatttttttgtttgttttcttttttctggttgttttttgttgttgttgttgttgttttacagctgaaaccaaccagcaagcccttgatgaccaagaggcgtttctttcaaagctatagggcacaaacaattgaccatagatgactccgtttgcattcttctgcagaattatttccttcagggacagattttccaacctaagaaactacctaccgtgtgtattctcttgacggggagagatgaacccttcagctgctaagatccaagaaaacgcctcactgccttaaccttaactgttcttcctggcgctaaaaagagctgtattttttaaagtgctggggcaaacaaagcaaccccaaaagagttgatgtgtgttttaaaagaaaaaacccaatgaggaacaattggagatttttatgcagaaactaaataatccttaataaataaatctctattttggaatcacaaaaaaaaaaaaaaaa

SEQ ID NO: 330 - DNA, 1181 bp, Homo Sapiens
agaaggcgggccccgtctgaggtctggcagtcagagacagccgggcgcccacggcccgagcgcccacggcagcaccatgcccgcactcctggagcgccccaagctttccaacgccatggccagggcgctgcaccggcacattatgatggagcgggagcgcaagcggcaggaggaagaagaggtggataagatgatggaacagaagatgaaggaagaacaggagagaaggaagaaaaaggagatggaagagagaatgtcattagaggagaccaaggaacaaattctgaagttggaggagaagcttttggctctacaggaagagaagcaccagcttttcctgcagctcaagaaagttttacatgaggaagaaaaacggaggcgaaaggaacagagtgacctgaccaccctaacatcagctgcataccagcagagcctgactgttcacacaggaactcatctcctcagcatgcaggggagccctggaggacacaatcgcccaggcaccctcatggcagctgacagagccaaacaaatgtttggaccccaagtgcttacgacccggcactacgtgggctcagcagctgcttttgcagggacaccagagcatggacaattccaaggcagtcctggtggtgcctatgggactgctcagcccccacctcactatgggcccacacagccagcttatagtcctagtcagcagctcagagctccttcggcattccctgcagtgcagtacctatctcagccacagccacagccctatgctgtgcatggccactttcagcccactcagacaggtttcctccagcctggtggtgccctgtccttgcaaaagcagatggaacatgctaaccagcagactggcttctccgactcatcctctctgcgccccatgcacccccaggctctgcatccagcccctggactccttgcttccccccagctccctgtgcagatgcagccagcaggaaagtcgggctttgcagctaccagccaacctggccctcggctccccttcatccaacacagccagaacccgcgattctaccacaagtgaccatcagattatatcttcaacaccacaccccccaccccatcgtgggtgagggtatcccctgtgtgtcccaggccaataaaatctacctgccactgccaaaaaaaaaaaaaaaaaaaaaaaa

SEQ ID NO: 331 - DNA, 10469 bp, Homo Sapiens
gcggcggcggcagcggcggcggcggcggcggcgcgggggttgagtcgtggtggtgcggacgcgctcgtgctcgggaactatcggattaaacttgaatcgagtgaaattacacaaaggagcgccgcggaggaggcggcccggggacccggacaccctgaaactcaccagagacccgttcgcccccggccaactccgtgcccgtggattcagccccctggccgcagctgccgagccaactccggagcccgctctgcgttttgttttcccctcggcactaggcagcggaggagcccgaccgacccggacctatatccagactttgcctgacactgcagggtccaagagaattaaagaaatatggaatgacatgaagaagattagttaaggattataggctttgagggcaaacacctcagtgaagtgaagcacaggcaagctcctgagctgtggtttggaggagccgtgtgttggaagaagatggcagatccaggaatgatgagtctttttggcgaggatgggaatattttcagtgaaggtcttgaaggcctcggagaatgtggttacccggaaaatccagtaaatcctatgggtcagcaaatgccaatagaccaaggctttgcctctttacagccatcccttcatcatccttcaactaatcaaaatcaaacaaagctgacacattttgatcactataatcagtatgaacaacaaaagatgcatctgatggatcagccgaacagaatgatgagcaacacccctgggaacggactcgcgtctccgcactcgcagtatcacacccctcccgttcctcaggtgccccatggtggcagtggtggcggtcagatgggtgtctaccctggcatgcagaatgagaggcatgggcaatcctttgtggacagcagctccatgtggggccccagggctgttcaggtaccagaccagatacgagccccctaccagcagcagcagccacagccgcagccaccgcagccggctccgtcggggccccctgcacagggccaccctcagcacatgcagcagatgggcagctatatggcacgtggggatttttccatgcagcagcatggtcagccacagcagaggatgagccagttttcccaaggccaagagggcctcaatcagggaaatccttttattgccacctcaggacctggccacttgtcccacgtgccccagcagagtcccagcatggcaccttccttgcgtcactcggtgcagcagttccatcaccacccctctactgctctccatggagaatccgttgcccacagtcccagattctccccgaatcctccccaacaaggggctgttaggccgcaaacccttaactttagttctcggagccagacagtcccctctcctactataaacaactcagggcagtattctcgatatccttacagtaacctaaatcagggattagttaacaatacagggatgaatcaaaatttaggccttacaaataatactccaatgaatcagtccgtaccaagataccccaatgctgtaggattcccatcaaacagtggtcaaggactaatgcaccagcagcccatccaccccagtggctcacttaaccaaatgaacacacaaactatgcatccttcacagcctcagggaacttatgcctctccacctcccatgtcacccatgaaagcaatgagtaatccagcaggcactcctcctccacaagtcaggccgggaagtgctgggataccaatggaagttggcagttatccaaatatgccccatcctcagccatctcaccagccccctggtgccatgggaatcggacagaggaatatgggccccagaaacatgcagcagtctcgtccatttataggcatgtcctcggcaccaagggaattgactgggcacatgaggccaaatggttgtcctggtgttggccttggagacccacaagcaatccaggaacgactgatacctggccaacaacatcctggtcaacagccatcttttcagcagttgccaacctgtcctccactgcagcctcacccgggcttgcaccaccagtcttcacctccacaccctcatcaccagccttgggcacagctccacccatcaccccagaacaccccgcagaaagtgcctgtgcatcagcattccccgtcggagccctttctagagaaaccagtgccggatatgactcaggttagtggaccgaatgctcagctagtgaagagtgatgattacctgccatcaatagaacagcagccacaacaaaagaagaagaaaaagaaaaacaaccacattgtagcagaggatcccagtaaaggttttggtaaagatgacttccctggtggggtagataaccaagaactaaataggaactcactggatgggtcccaagaagaaaaaaagaaaaagaaaaggtcaaaggcaaaaaaagacccgaaggaaccgaaagaacccaaggagaaaaaagagcccaaggaacccaagaccccgaaagcccctaagattcccaaagagccaaaggaaaagaaagcaaaaactgccacgccaaaacccaaatccagcaaaaagtcaagtaataagaaacctgactcagaagcaagtgctttgaagaaaaaggtcaacaagggaaaaacagaaggttctgaaaattcagacttagacaaaacacccccaccatctcctcctcctgaagaagatgaggacccaggtgttcagaagagacggtccagcagacaggtgaagagaaagcgctacactgaagacctggagttcaagatttctgatgaggaggcagatgatgcagatgctgctgggagggattccccctccaacacctcccagtcagaacagcaggaatctgttgatgcagaaggcccagtggtagaaaaaattatgagcagtcgttcagtaaaaaagcagaaggaatctggagaggaggtagaaattgaggaattctatgtgaaatacaaaaacttctcttatcttcattgtcagtgggcatctatagaagatctggaaaaagataagagaattcagcaaaaaattaaacgatttaaggcaaagcagggccagaacaagttcctttcagagattgaggatgagctttttaatccagattatgtggaggttgaccggataatggactttgcacgtagcacagatgaccggggagagcctgtgactcactatctggtgaagtggtgttcacttccttatgaagacagcacgtgggagcggaggcaggacatagatcaagcaaagatcgaggagtttgagaaactaatgtccagggagccggaaacagagcgtgtggagcgacctcctgctgatgattggaagaaatcggagagttccagggagtataaaaacaataacaaactcagggaataccagttggagggagtaaactggctacttttcaattggtacaacatgcgaaactgcattttagcagatgaaatgggtttgggaaaaactatccagtccattacatttctctatgagatatatttgaaaggaatccatggcccttttttagtaattgccccattgtccacaatccccaactgggaaagggaattccgaacctggacagagttgaacgtggttgtgtatcatgggagtcaagctagtcgtcggaccattcagttgtatgaaatgtacttcaaagatccccagggtcgagtgataaaggggtcctataagtttcatgccatcatcactacatttgagatgattttgactgattgtcctgagctgcggaatattccatggcgctgtgtagtcattgatgaagcccacaggctgaagaacaggaactgcaagctgttggagggactcaagatgatggacttggaacacaaagtgctgctgacgggaaccccactccagaacactgtggaagaactcttcagcttgcttcatttcttggaaccaagtcgcttcccttcagaaaccacatttatgcaagaatttggtgatctaaaaacagaagagcaggtgcaaaaacttcaagctattctaaagccaatgatgttgagacgtctcaaagaggatgtagaaaagaacttggcccccaaagaagaaactattattgaagttgagctaacaaacattcagaagaaatattaccgagccatccttgagaagaatttcacatttctttccaaaggcggtggtcaagctaacgtacctaacctattaaacactatgatggaattgcggaagtgctgcaatcatccgtaccttatcaatggtgctgaagagaaaattttggaagagtttaaagaaacacacaatgcagagtctccagattttcagctccaggcaatgatccaggctgctggcaagctagtgctgattgacaagctgctgccaaaactgaaggctggtggccacagggtgcttatcttttcccagatggtgcgctgcttggacatactggaagactacctcattcaaagacggtacccatatgaaaggatcgacggccgagtaagaggcaacctccgccaggcagctatcgacagattctccaaacctgattctgataggtttgttttcctcctgtgtacaagggcaggaggtttaggcattaacctcactgctgctgatacctgcatcatctttgattcagactggaatccccaaaatgacctccaggctcaggctagatgtcatagaataggacagagcaaatctgtgaaaatctacaggctgattacaagaaattcctatgaaagggaaatgttcgacaaggctagtttgaaactgggcctggataaagctgtgctacagtctatgagtggaagagaaaatgctaccaatggggtacaacagctttccaagaaagaaatagaggatcttctacgaaaaggggcctatggtgcactcatggatgaggaggatgaagggtctaaattctgtgaagaagatattgatcagatcctcctacgtcgaacccacaccattaccattgagtcagaagggaaaggttccacatttgctaaggccagttttgttgcatctggaaataggacagatatttccttggatgatccaaatttctggcaaaagtgggctaagaaggctgaattggatattgatgccttaaatgggaggaacaacctggttattgatactccaagagtgagaaagcagaccaggctctacagtgcagtgaaggaagatgagctgatggagttctcagacttggaaagtgattctgaagaaaagccctgtgcaaagccacggcgtccccaggataagtcacagggctatgcaaggagtgaatgtttcagggtggagaagaatctgcttgtctatggttggggacggtggacagacattctttcccacggacgctataaacgccaactcactgagcaagatgtagaaaccatctgcagaaccatcctggtgtactgtcttaatcattacaaaggggatgagaatatcaaaagcttcatctgggatctgatcacacccacagcggatggccagactcgagccttggtcaaccattccggtttgtcagctcctgtgccaaggggaaggaagggaaagaaggtgaaagcccagagcacacagccggtggtgcaggatgccgactggctggccagctgcaacccagatgccctgttccaggaggacagctacaagaaacacctgaagcatcactgtaacaaggtcctgctgcgtgtccgcatgctgtactacctaagacaagaagtgataggagaccaggcggataagatcttagagggtgctgactcaagtgaagccgatgtgtggatccctgaacctttccatgctgaagttcctgcagattggtgggataaggaagcagacaaatccctcttaattggagtgttcaaacatggctatgagaagtacaactccatgcgagctgaccccgcgctgtgctttctggaacgagtcggtatgcctgatgccaaggccatagctgccgagcaaagaggaacagacatgctagcagatggtggtgacgggggagaatttgatagagaagatgaagacccagaatataaaccaaccagaacaccgttcaaagatgaaatagatgaatttgcaaattctccttcagaggataaggaagaatccatggaaatacatgccacaggcaagcacagtgagagtaatgctgagttaggccaactttactggcctaacacttcaaccctgactacacgtctgcgccggctcattactgcctatcagcgcagctataaaaggcaacagatgaggcaagaggccctaatgaagactgaccggcgcagacggcggcctcgagaggaagtgagagctctggaagcggaaagggaagctattatatctgagaagcggcaaaagtggacaagaagagaagaggctgatttttaccgtgtggtatccacctttggggttatttttgaccctgtgaaacagcaatttgactggaaccaatttagagcctttgccaggcttgacaaaaaatctgatgagagtttggagaaatacttcagttgttttgtggccatgtgtaggcgagtatgtcgaatgcccgtcaagccagatgatgaaccgcccgacctctcctccataattgagccgatcacagaggagcgagcctctcgaactctgtaccgcattgagctgctacggaagatccgcgagcaggttctccatcacccccagctgggagagaggcttaagctctgccagccaagcttggatctgccagagtggtgggagtgtggacggcatgaccgagacttgctggttggtgctgctaaacacggggtcagtcggacggattatcacatcctcaatgaccctgagttatccttcttggatgcacataaaaactttgctcaaaacagaggggcaggtaatacatcttccttgaacccactggcagttggatttgtccagactcctccagtcatctcatctgctcatattcaagatgagagggtactggaacaagccgaaggcaaagtggaggagcctgaaaacccagctgccaaggagaaatgtgagggcaaagaagaggaagaagaaaccgatggcagcgggaaggagagcaagcaggaatgtgaggcagaggccagctctgtgaaaaatgaactgaaaggtgttgaggtcggcgcagacactgggtccaaatctatttcagagaaaggttccgaagaggatgaagaggaaaagctggaggatgacgataagtcggaagagtcttcccagcccgaagcaggagctgtctctagagggaagaattttgatgaagaaagcaatgcttccatgagcactgctagagatgaaacccgagatggattctacatggaggacggagatccttcagtagctcagctccttcatgaaagaacatttgccttctcgttttggcctaaggatagagtaatgataaaccgcttagacaacatctgtgaagcagtgttgaaaggcaaatggccagtaaataggcgccagatgtttgatttccaaggcctcatcccaggttacacacccaccacagtggacagccccttgcagaagaggagctttgctgagctctccatggtcggccaagccagcattagtgggagtgaggacatcactacgtctcctcagttgtcaaaggaagatgccctcaacctctctgtccctcgccagcggaggaggaggaggagaaaaatcgaaattgaggccgaaagagctgccaagaggcgaaatctcatggagatggttgcccagcttcgagagtctcaggtggtctcagaaaatggacaagaaaaagttgtagatttatcaaaggcctcaagagaggcaacaagctctacctcaaatttttcatctctttcttcaaagtttatcttgcctaatgtctcaacaccagtgtctgatgcctttaagactcaaatggaactgctccaagcaggcctttcgcgcacacccacaaggcatctccttaatggctccctagtggatggagagcctcccatgaagaggaggcggggaaggaggaaaaatgtggagggacttgatctgcttttcatgagccacaaacggacgtcattgagtgcagaggatgctgaggtgaccaaagcttttgaagaagatatagagaccccaccaacaagaaacattccttctcccggacagctggacccagacacacggatccctgttatcaatcttgaagatgggactaggctggtgggggaagatgctcctaaaaataaggatttagttgaatggctgaagctgcaccctacttacactgttgatatgccaagttatgtaccaaagaatgcagatgtgctgttttcctcatttcagaaaccgaaacagaaacgacatagatgtcgaaaccctaataaattggatataaacactttgacaggagaagaaagggtgcctgttgtcaataaacgaaatgggaagaagatgggtggagctatggcgcctccaatgaaggatctacccaggtggctggaagaaaatcctgaatttgcagttgctccagactggactgatatagttaagcagtctggttttgttcctgagtcgatgtttgaccgccttctcactgggcctgtagtgcggggagagggagcgagcagaagaggaagaaggcccaaaagtgagatcgccagagcagccgcggccgccgctgctgtggcctccacgtcagggatcaaccctttgctggtgaacagcctgtttgctggaatggacctgacgagccttcagaatctccagaatctccagtcgctccagctggcaggcctcatgggcttccctccaggactggcaacagctgccaccgccggaggcgatgcgaagaaccctgctgctgtgctgcccctgatgctgccaggaatggcgggcctgcccaacgtgtttggcttgggcgggctgttgaataaccctctgtcagctgctactggaaacaccactactgcttctagtcaaggagaaccggaagacagcacttcaaaaggagaggagaaaggaaatgagaatgaagacgagaacaaagactctgagaaaagcacagatgctgtttcggctgctgactctgcgaatggatctgttggtgctgctactgccccggctggattgccctcaaacccgctagccttcaaccctttcctcctgtccacaatggccccgggcctcttctacccatccatgtttctacctccaggactggggggattgacgctgcctgggttcccagcattggcaggacttcagaatgccgtgggctccagcgaagaaaaggctgctgacaaggctgagggaggaccctttaaagatggagagacccttgaaggcagcgatgccgaggagagcctggataagactgcagagtcctccctcttagaagacgaaatagcacagggtgaagagctagactcacttgatgggggggatgaaatagaaaacaatgaaaatgatgaataaccagtaccagttccagttcaagtgtttaaaacttttgacaagtggtagtcctactgtttacactcacagttaatgttcatacctagttttataagctgttctgtaacatagtgtagcaaaaaaaaaagttcaagtcatgttatacaggtgtgtcaaaaggtatcttggtcattaagtattgtgcagtgcattatttattatccctaggagagatgaaatttgagaggtgatcatgtctttttaaggaaacttacataatgctctgctttttttttttctcttggtaccattggtattataataaagagcaatttgtaactgagtggcactaatggaagaaagtgctgctcaaaggaagtatgaagttatatatttaattttttaattttaatttttaatttttttgctgtgaaggtcaagctgaaatttaccatacatatcatacttgctcatttgtttccctttttgactgtatgggggttcccacactcgtgcatacacacacatccatacactctgacaatctccacgctagtgtgaacgcctctgtcccgaggcgcagcaataataaggcagctgttgaatgtgaagggtccctttggaaaattaacctactgggagggttcttgccagacagaactacagttccattgtctcgtggtcttgtaatgcactggtaaaaacaaaataaatagatgaataaataaagagtgagagaagagagaatcaggtaccttttttaaattaaaggactttgttactttagccacaaagctaaaacagcattacctcagctctaaactagccttgaagtttacagacatgactttgtaaatgtattgtttttctttgttgtgatgtccttttatttttttctttgaaaactgctatcatgtaagataaaatgtaaattgctgccaactgtagtaatgatgcttttaataaaagtgacccatgatatgcagagatgtaaaaaaaaaaaaaaaaaaaaaaaaaaa

SEQ ID NO: 332 - DNA, 3460 bp, Homo Sapiens
gtttttctctctgctttctcaacagccagatctgccagtgagcctcaggctttaggaactgaagagtgtttctgaaagatctatccagcactccgatggccagcaacaacaccgccagcatagcacaagccaggaagctggtagagcagcttaagatggaagccaatatcgacaggataaaggtgtccaaggcagctgcagatttgatggcctactgtgaagcacatgccaaggaagaccccctcctgacccctgttccggcttcagaaaacccgtttagggagaagaagtttttctgtgccatcctttaagtctttgagaggggcctgaagagcctccgggctcctgggacattgatgtagagtttttagtgaagtgggcacctttctagtccacggcatttgaagagagcgaggagaaccattctggaaactctaggctatgcatgtttaaagatctggtcccctttatgagaatgcaagccgatccacatcctgacttaagagatctgattctgacgaactgcctggaggaggggaatatataaaaataaaattggtgtcacttcttttctgctatcccccagccccccccccaaaatcctcatgtttctgcttcatattttgaaaaataacaattaaaacagacagctgtactgaggtaagatatgtgtgaccttcttggaatgaatattgtctttagaataccctttgataagctgagctgtcccgtgtagatgcaattcggtttaatggcattgatgtatagtcactgtgcctttctttttctttcttccttctcctctacccctccttccacccctccccattagagtagtgtggagataaggctggactggtctatcagattgaactccaagaatgatcacacaaaatgtttagggagatgttccccgtggtgtatcctcatggtaacaacgacaaaaaatgccggttgtctttgttctcttttcactattcctaacatgtgtacatgatagctttgattctgcaagtaaaagtaaatcctgtgttgtgactggtgctttcatatatttgtgacaatttttgagtaatattgcatgaaaatgtccctatgttacatccattcagaagttttgttgttttactctaaagctgggaaaggaaatgagagggaaaagaccccggagagggaagaaaatctcagtattttgaaaattgagattacttcagagccttagccacacctaaaatacctcctagttaatagtggtataaatgcctcttcaatacgttttccagaatccaaagcattttggtttatccaggacccagggcagcacagctgtcaccaagcaggagagttaaggattcaccatgagctgggaaatgcttttgccatgagtatgagcaaattccctctttccctgaatcatggacattctagattaaaagaacatttttttgtgctcttaacaagataaccatggccctcctttgttcaagtatcagaagaaataaacccacagctccagagaaggtgaccattctcagaactccagctattcactctccagggagaaggacctcaaatcgccactctttgggcggcaggtgcggtccccacggccggctctacgaggaagagttctggctcttttgtccactgagatggtcttggtttttcacttaacaaattttttaatggaatctttgtttttgttctccatcttgtttgttagagtctctcggcctttatttacaaattccttgcaactagagcgctccttccccaagatatggtagtgagagtaatttttcattgtagctgtagtctccatcagtaacagcaggccctggaagacttgatcacctttttctgtgtcattttcagtcaaagagggcctctcttacatcttgtttgctttcaaatccccaaatatcatctccatctccgaattaattttattgtctctttcctctctattcgctttctcctgtttttttttttaaaaaaaagcatgaaaaagggagagaaaaagtttgatatgccaaggacagattttgaaacagacttggtaaatgttttccttagctccttcatgggcatgctggtgaaagaataaatacatccaattaaagctcatgctggggtcggggagaagaggatactgaaacatttgtgaaatgtatgaatgcacttctgtaaccagatacttctgttcttctgttcaaattgtggggtttttgttacagttaggacgcccatgaagatttaggggtgaaaaaaacagcagagtatttattaaactacagcattgtacaattagcttagtaacactatggaataagctaaaacatatcacagtttttacatgggccaaaacatgaattgagtatgtggtcacatgaaaacacggatgaatgaataaaacactctttggtggtgactgaggcatcattagaaggcccagacgatttccactattcacagcatttccttttctcagaaggactctttatatttccatgtaaatctagatctttggagcaattaagatggaattacaatttctagggagcattttaaggaaaatgttttggctttttcataattttatgtcttacagtatggaattataatacgaaaatctttatatgagttttggcttcttggtatttgtacttattcaggggaaaaagtctttcgattacttatgcctctatagagcttaatttcttgagaaattcaacagtcattttcaccagcataattttatcttaaggaataactaataggaaaagtcagcttaattatttaaggccctagtttctacatataatatattcgatagaaatgaaaatctgccgtggaattaactaataagtagtaacaataaacttcatatttagaatgcaaagtctataaagaataattttacatgatcctcaatatcaactccagtttaaaaagtgttatttttaaaacatttgaaaccaagtactgtttaatttcaatcagaagatgcaaatacatactttgatctatgtttgattttgctaataatatttgaaggagattgcctaccaaggacaaaacaataaatttaaaaatcaaacgatttctccatacgctcatagtcacatatggaattttgagaaaataaagcatgctgtctttaggaatttttatacttctttgtctttcttccttaatatttgcttctagctgctcttggcaatgatgaattgttatgtatgcattaatgttttgcagcccaaaagttgttcacatttttcctatataagatctgtggagtgtgtgtttcaaagagagaactacagaaatgttaaagcaggaaaacctgaatgtgatgtgcacattttcatcccacatggacaatgtatgtgttttaataaatggaattttcagattcaaaaaaaaaaaaaaaaaaaaaaaaaacaaaaaaaaaaaaaaa

SEQ ID NO: 333 - DNA, 8158 bp, Homo Sapiens
gggtttcagcgagttctacgtgccaggtccgcccggtgccggcttcctcgctgcccctggcggctcgtcagcccccactacccctgaacttggtcccaatggcggcccgcccctccttcacccggaccgtgggcatctgggcctcgccgaagccgtcaaggtggctgctcgggcttctagagcccgtgtccagccctttgccaccgaggcctgatcctcttttctgccctaaagaacttgccctgacagcctctggctcccgctcttgaggatcttgcttgtccaaacccagaagacagtgcatgaagccaggggacatccgccatgctccaaacaacttggcctcaggagtcagtgacctttgaggatgtggctgtttacttcacccagaatcaatgggccagcctcgaccctgcgcagagggccctgtacggggaggtgatgctggagaattatgcaaatgtggcttctctggtagcgtttccattccccaaacctgctctgatctcccacctggagagaggggaagcaccatggggcccagatccctgggacaccgagattctgagaggcatcagtcaaggtggtgagtcctggatcaaaaatgaagggctagttataaagcaggaggcctctgaagaaacagagttgcacagaatgccagtaggaggacttctcaggaacgtttctcagcactttgattttaaaaggaaggcactgaagcagactttcaatctaaatccaaatctgatacttcgaggtggaatgaagttctatgaatgtaaagaatgtgggaaaatcttccgatataactcaaagcttattcggcatcagatgagtcatactggggaaaagccctttaagtgtaaggagtgtggcaaagctttcaagtccagctatgattgtattgtacatgagaaaaaccacattggagaagggccctatgaatgtaaggagtgtggcaaaggtttgagttccaacacagccttgactcaacatcagaggatccacactggagagaaaccctatgaatgtaaagagtgtggaaaggctttccgtaggagtgcggcatacctgcagcatcagagattacacacgggagagaaactctataaatgtaaggaatgttggaaagctttcggttgtaggtcactttttattgtccatcagagaattcatactggggagaaaccttatcaatgtaaggagtgtggcaaagccttcacccagaaaatagcctccattcagcatcagagagttcacactggggagaagccttatgaatgtaaggtgtgtgggaaagccttcaaatggtatggaagttttgttcagcatcagaaattgcaccctgtggagaagaagccagtcaaggtccttgggccatccctggtcagtccccagtgctcctctccagccatacctcctgttcttctccagggatcctgttctgcttcagccgtagctgtgccttcactgacctttccacatgctgtgctcattcctacctctgggaattttttcatgctgctgcctacatctggaataccttcttcatctgcccaaatagtgcgtgtcttccagggtcttactcccactgtgaaaccttccccagttattctcaccccttcttctcactcctcatgagctttatcttggcagtcttacggctcttatgcctagcaaacctccagcctaattttatatatttttttgagaaagggtcttgctctgtcacccaggctagagtgcggtggtgtgatcttggctcactgcaacctccccctcctgggttcaagcgattctcctccttcagactctcgaatagctgggattacaggcacgcctcaccacgcccagctaatttctgtatttttagaagagatggggtttcgccatcttggccaggctggtctcaaacacctgacctcaagtgatccgcctgccttggccccccaaagtgctgggattacaggagtgagccactgtgcccagcctccaacctaatttgagtttcatttgtatttttttcatcaccttacatgtgttaacagctgtttcaacataaactccattataatctatatacatttaaagaccgtgtttacataatctcttctgggtagaaaatggaaatacttaacctttgcattggtccctttcaggcttgaacaacagtggctgtatctgcatcgtggggttgctggtggtagaacactttggtgttaggaaagtttggaaaagaggatatccctgtattaggccattatgattagagataagcagcctgggagaaacatacaagacctgtggctactggtagagaattggaataagcttccaacaatggactgtagagattaatggagattgtttagtgggcccatggctaggtggggtattaatacagttgaagttatgttgcccttggcacagatctttgagaatctcatacatctgtgaaaaagataatgtgaaataaacagtaaaaaaaaaaagtatgttgatggcagtgagagtaatcatgtctttaaacgtgaagtttttttttctttagttttgctcttgatagctagatgtttcttttaacttttattacgtaagtaaatatacacaaaggcattcatctttgttgaatctgttgtgcagatttttcttgatgagcattctgtttttttttctttgtgagcactggcttctatattttatttcatatttatgaattataaatatgaatttaattactaaagaaataaaaataatggtgtaaagccaactcgaggggaatctgaataagcttccaaaatttttttttttaagaaataaagggagctgtgtagtgggtcagtggctaggtaggttagtgaagtggaatttggggttgctcttggaagtggccttgatgaggatcctttacaactattcagaggactgtgtgaagtagttactggaaaaagaacttgaattatgcatttattggcattaatgtaaacagtaagtcctaagctttgatggaagggtccatacatttttttttttttttgctgatgttgctatctagatgtttctctatagcaattaatagcaaaacctttacattcttggtttttaaactttaccatgtgtctgaattacatagtgtgcttgtaaaaagaagagttttctctcttgcacaaattctgattttggctatctgtggtgatggccagatctttagcatggaccatactttgagagatatgcttcaaacagaaaatgcccacccctcctcctttacccagcataaactctatggttaattcttaaaataatgccttacagtctccattaactcccttgcccttctcttgctttgtcatgctcgcttggcaaaacctcatctctgactaaatgcagttctttgccttctctgttcctgcaccaaaaatgatcaggagaaagcatattaccaggctgaactgtcactttaaattcatgaccagtaacttcatggaggcccttaacgtttcctgatggtcatactacaatttttggagtccacttaactcccctgctttcctaggccactactttatactttctctcttctgtaacttccaaagcatccctctcagttctcatgctcagctgatggttatgtttctgccttcggcgagagaacagcaagctccagaaagtggctgcgccttcagccccgtgctagaatgagaacatatggagccaacttgagttcggaagggctgtggccacctcgtttcgcccatctacttttcaccttgccgtatctgattcttcaccaccgtattctcagtcacttccactaaacagtgccagtgttttaaggttctgtcacactcagtaacccacttctggttcctcattccgtgtcagtgatcagcagtagactgaagaatctaccttagatttgctccatactattaattagcttacaaaatgtctaagaggagctaagctgggatgccacataggcagaagccaggaaaaatgaccaaccacagaaccaagtggttccagtggaaactcagcagctgctggtgcctgctactggactgccaccccccattgaagagactggaccaccaggaaggtcgtttcacattctgtagtaaaaatacccctacaatcattttggtagggtcttctgtcttcagccagggtgtacctgctcggtgggagttggttatatatgtatgtccaagttgcaggggcttctgggaaatacaggttttggattctgcctgggaagagagtcatagtatgaagaagtctgaaaatggggaagggattttcagaatatgttgagcagctgtaaaatatcagatacccattataggcattgaaggttacctaaatgacagaaggatgcactatattcatgggtaggaaagattagtttcatcaagatttcaatttttatcaattcataaattaaaaacaatataaaaattccagaggggtgtgtgtatagagaggcaaaggacacagagtagctaacctagttttgaagaacaagatggggggttttatgctaccagatattatatacaatgatcatcaaacacagaacaaagcaaaaaacaaactccccaaacccaagttgaaacaaaaaaacccccagactgtaatagtattattattattttttaagatggaatcttgctctgttgctcaggctggagtgcagtggtgcaatcttggctcactgcaacctacacctcccgggttcaggtgattctcttgcctcagcctcctgagtagtgtgtgccaccacgcccagctgattttttaatttttagtagagacagggtttcaccatgttggccaggctggtcttgaactcctggcagcctcaggtgatccacccacctcggtctcccaaagtgttgggattacaggcgtgagccactgcacctggcctgtaacatgatttgctgaaatttttaaaaatcttaaataatgtactgtttagaaatatacatattttatacaaaattataaagaaagcatagagaggtaagcattagtggcacagctgagaaaatataaaaggtagttctgtctctatcctgtctcctttattctgctactgctctcattctgtctcatcccaggaatccagtcccaagtgctgcctgccaatcgtccagcaccctccacctttgccacctatttcttgttgtaaaacagatgtttgtttctaaaatataatgaattaatgattatcaaagtacaggcatacctcattttattgcagtttgttttattgtgtcttgcggatattgcattttttacaaactgaaggtttgtggcaggcctgtgttgagcaagactatcagtgccattttttttcaacagcatgtgctcatttcatttttctgtgtcttacacagaaacttaaaatatttcaaacttttcattatatgtgttttggtgattagtgacttttatgtttctattgtaattgttttggggtgccacagactgcatccatctaagacagtgagcttagttgatgtgtgtgtgtgtgttctgattactccactaactgatggttccccatctctctccctctcctcagacctcactattctctcagacacaacagtattgaaattagaccaattgataaccttacaaacacctttaagtgtttaagtgaaaaagtcacatgcctctcactttaaatcaaaagctagaaatgattaagcttagtgaggaaggctaatgtcaacagctgagataggccaaaagctagactgcttctgccaaacagtcaagttgtgaatgcaaaagaaaagttcttgaaggaaatgaaaagtacttctccagggaacacatgaacgataataaagtggccaggtgcagtggctgacacctagaatcccagcacttcggggagccaaagcgggaggatcccctgaagccaggagtccgagaccagcttgggccacaaagtgagacccctgtctctacggggaattgaaaatttagctgggtgtggttgtgcatgcctgtagtccgatctacttgggaggctgaagtgagaggatccctttagccagggagttcgagactgcagtgagctatgattgtgccactgcactctagcctgtgtgacagaatgaaaccaaaaaaagtgaaacagcattattactgatatggagaaagttttaggggtctggatcaaaccaaccacaaattcccttaagccaaaacctaatccagagcaaggccataactgccattgtatgaaggctgagagaagtgaggaagctgcaggaaagtttgaagctagcagaggttggttcatgaggtttaagaagtcatcttatcataaaagtgcaaggtgaagcagcaagtgctggtgtagaagctgtagcaatttatccagatctagctaagttaattggtgaagttgctacaccacgagattttcagtgtattccaaacagtcttcttttggaagaagaaaccatctaggactttcatggagaagagaagttaatccctggcttaaaagcatcaaaggacagctcgtctctcttgttaggggttcatgcagctggtaactttaagttgaagccaatgctcatttaccattcagaaaatcctagggcccataagaattatgctaaatccactctgcctgtgctctagaaatggaagatcaaagcctggatgacagcacatctgtttacagcatggattactgaatattttaagcccactgttgagacctactaaatattaggaaaaaagaattctgtcaggtgtggtggctcacacttgtaatcccaacactttgggaggccaaggcaggtggatcagttgaggtcaggagtttgagaccagcctgaccaacatggagaaaccctatctctactaaaaatacaaaaattagctggatgtggtggtgtgtgcctgtaatcccagctacttgggaggctgaggcaggagaattgcttgaatccagaggcagaggttgcagtgagctgaggttgcaccactgtgcttcagcctgggtaacagagtgaggctgtctcaaaaaaaaaaaaaaatttagttccaaatattactgctcgttgataatgtgtctggtcacccaagagttctgatggagatgtacaaagagattaatgtttttatgtctgctaaacaacatccattctgcaggatccattactccatgggtcaaggagtaattttgactttcaagtattatttaaggaatacattttgtaaggctgtggctgccatagtggttgttctgtacaaagtaacttgaaaaccttctggaaaggattcatcattctagataccattaaggacatttgtgattcatgggagaaggtcaaaatatcaacattaacaggagttcagaagacattgacctcaaccctgatggatgatcttgaggggttcaagacttcagtggacgaagtaactgcagatgtggtggaaatagcaagataactagacttagaagtggaacctgcatatgtgactgaattgctgcaatctcatgataaaacgtgaacaaatgaggagttgcttctaatataagagccacaaaagtggtttcttgagatggaaactactcctggtgaagatcctgtgaccattgttgaaatgacaacaaaggacttagaatattacataaacttagttgataaaacagcagcagagtttgagaggattgacttcaattttgaagaatgttccactgtgggtaaaaggctatccaacagcaacacatgctacagataaatccttcggaaaggaagagtcagttgatgttgcagccttccttgttgtctcatttaaagaaatctctagagccacactaaccttcagcaaccaccacaccgatcattcagcagccatcaacagtgaggcaagactgtcttccagcaacaaagactcactgaagacttagattatcgttagcatcttttagcaataaaatatttttaaattaaagtatgtacattgtcagatataatgctattgcaaacttaatagactataatatagattaaacataactgttataggtactggaaaataaaaataattgtgtgactcccaaaaaaaaaaaaaaaaaaaaaaaaaaaaaaaaaaaaaaaaaaaaaaaaaaaaa

SEQ ID NO: 334 - DNA, 2385 bp, Homo Sapiens
atggccgacttcgatgatcgtgtgtcggatgaggagaaggtacgcatagctgctaaattcatcactcatgcacccccaggggaatttaatgaagtattcaatgacgttcggctactacttaataatgacaatctcctcagggaaggggcagcacatgcatttgcccagtataacatggatcagttcacgcctgtgaagatagaaggatatgaagatcaggtcttaattacagagcacggtgacctgggtaatagcagatttttagatccaagaaacaaaatttcctttaaatttgaccacttacggaaagaagcaagtgacccccagccagaagaagcagatggaggtctgaagtcttggagagaatcctgtgacagtgctttaagagcctatgtgaaagaccattattccaacggcttctgtactgtttatgctaaaactatcgatgggcaacagactattattgcatgtattgaaagccaccagtttcagcctaaaaacttctggaatggtcgttggagatcagagtggaagttcaccatcacaccacctacagcccaggtggttggcgtgcttaagattcaggttcactattatgaagatggcaatgttcagttggttagtcataaagatgtacaggattcactaactgtttcgaatgaagcccaaactgccaaggagtttattaaaatcatagagaatgcagaaaatgagtatcagacagcaattagtgaaaactatcaaacaatgtcagataccacattcaaggccttgcgccgccagcttccagttacccgcaccaaaatcgactggaacaagatactcagctacaagattggcaaagaaatgcagaatgcttaaaggctgaatgtaggattcttcagtatgtggaaagacaaggattcaacgtgtggtcatatgataaataagtgatttataaacaagagtgatattttgctagggctttcaaagttaaccggttttctagcctcatggaatactgttgaacctatagcgttgtcttgattcttttgtgttctctgccttgtaattttctgttactgctatatctacgtgtaaatctttttttctttttttttttttttttttttcttttttggttaattctgccacatttaatgttggtgagagagtgatctatcctaatgacatttactgtttaaaaaagtttcctagccatgaagccctgctactgatttagacaaggtattatggtcattactttgtacccctatccttccaagcacttctggtacttcagtcgtttttactgatccaccaacacctaaagaggctatgctacagtctctagctaaatggaagacacattcatccttctccctctgactgctttgatcatcatttattgcatcgtcatatcatatttatcgcatctcataactaactttctaaagtttggattgggacttttcaggtcctttttggagggcaaaggaagttccagcttctctggggaacttgtttttaaatccaaagacttgaaccacattccctgcacatgaacatgtttgcttttatcccttctctcattggctccttcccatcttagtaccattgtagttatacatctgcattttttagaagcattttacccatttatttttttaaacattcaagaactgctgacgtactgtggatgtagagtataaaacttgaaaaatgcagatgttgaaggaataataggtatcttgtgctttaatactttatggcaggattgtactataagcaaatgaattaaacagctatgtaaatcataaagaaaaactaaaaatgaaccaaagtgaaaggataacttccaggcagtatctttctattgtaacctgttatttaaggaaatactagtgatttcttctaaataggatgtaaacttctttcaaattactcttcctcagtctgcctgccaagaactcaagtgtaactgtgataaaataacctttcccaggtatattcggcaggtatgtgtgtaatctcagaatacacaggtgacatagatatgatatgacaactggtaatggtggattcatttacattgtttacacttctatgaccaggccttaagggaaggtcagttttttaaaaaaccaagtagtgtcttcctacctatctccagatacatgtcaaaaagaaaaggtgtttgtgctccgttttgtttctgctcagtaatatagtcaagcaagtttgttccaggtgacccattgagctgtgtatgcatttttgtttatttcaataaaatatatttgtattatttgtccttcatactatccatccataccacactatcttctgtatcaggtagtctaatagaaatatacctgttttgttctaaaaaaaaaaaaaaaaaaa

SEQ ID NO: 335 - DNA, 4758 bp, Homo Sapiens
cgcggagaagcttgggtacctgagccgcggtcccgggtgacaccctcagtgacgccaggcgcgttccttcctcttcctctctcctctccggccccgccttcccttccctccgcccacctccctgaagcggagccgccgtcgccaccagcgccgtcatgtcggcccccgccgggtcctctcacccggccgccagcgcccggatcccgcccaagttcggcggatcggccgtctcaggagccgcagcgcccgcgggcccgggtgcgggcccggcgccgcaccagcagaacggtccagcccagaatcaaatgcaggttccatctggatatggattgcatcatcaaaactatattgctccctcaggacattactctcaaggacctgggaaaatgacctcattgccattggatacccagtgtggtgattactactctgctctctatacagtaccaacacaaaatgtgactcctaacacagtgaaccagcaaccaggagcacagcagttgtacagcaggggtcctcctgcccctcatattgtgggatccactctaggatctttccaaggtgctgcatcgtcagcatcccatttgcatacgagtgcctcccaaccatactcctcttttgtgaatcactacaatagtccagccatgtactctgccagctcttctgttgcgtctcagggatttccctctacttgtggtcattatgctatgtcaactgtttctaatgccgcgtatcctagtgtttcatatccctctctgcctgctggtgatacatatgggcaaatgtttacctcacagaatgctccgactgttaggccagttaaagataattcattctctggtcaaaatacagctatcagccatccatcgccacttccacctctaccatcacaacagcaccaccagcagcaaagtctttcaggatacagtactctaacgtggtcatctccaggccttccatcgactcaagacaatctcatccgaaaccacacaggatccctggctgtagcgaacaacaacccaaccattactgttgcagattctttatcctgtcctgttatgcaaaatgttcagcctcccaagtccagcccagtggtatccactgttttatcaggatcctcaggatcctcatcaacaagaacacctcccactgcaaatcacccagttgagcctgtgacctcagttacacagccatcagagctattacaacaaaaaggcgtgcagtatggtgaatatgttaataaccaagctagctccgcaccaactcccttgtcatcaacttccgatgatgaggaagaggaggaggaggatgaggaagcaggtgttgacagctcttctaccacaagcagtgcttctccaatgcccaacagttatgatgccctggaaggaggcagttacccagatatgctttcttcatcagcaagcagtcctgctcctgatcccgcccctgaacctgatcctgcttctgctccagctccagcttcagctccagctcctgtcgtccctcagccttcaaaaatggctaagcctttggctatggctatccaacacttcagcctggttatcagaatgctacagcaccacttatttctggagtacagccccagtaacccggtatattctggattccagcagtatcctcaacagtatcctggtgtgaaccagctatcctccagtataggaggattgagtcttcagagttctccacaaccagaaagcctgagacctgtaaaccttactcaggagaggaatattttacctatgactcctgtttgggctcctgtacctaacttgaatgcagacctcaaaaaattaaactgtagcccagattcatttcggtgtactttgacaaatattccacagacacaggctttactgaataaagctaagcttcctttaggattgttgttacatcccttcagagacctaacgcaattaccagtgataacatcaaataccattgtgaggtgccgatcctgtcgaacgtatattaacccctttgtatccttcattgatcaacgtagatggaaatgcaatttgtgctatagagtaaacgatgttcctgaagaatttatgtataacccccttacccgatcttatggagagcctcataaacgaccagaagttcagaattcaactgtggagttcattgcttcttcagattacatgctgcgtcctcctcaacctgcagtttacttgtttgttttagatgtgtctcataatgcagtggaagctggatatttgacaattttgtgccagtcactcctagaaaatctagacaagcttcctggagattcacgaacaagaataggattcatgacctttgatagcactattcatttctacaatttacaagaaggattatcacagcctcaaatgttgattgtgtctgatatagatgatgtttttctacctacaccggatagtttacttgtgaatctatatgaaagtaaagagcttataaaagacttactgaatgcattaccaaacatgttcaccaatacaagagaaacacacagtgcccttggtcctgcacttcaggctgcctttaaattaatgtctccaacaggtggccgtgtgtctgtatttcagacacagttaccttccttgggtgcaggacttctgcaatccagagaagatcctaatcagagatcaagtacaaaggtggtacaacatcttggccctgcaactgatttttataagaaacttgcattagattgctcgggacagcaaactgcagtggatttgttccttttaagttcacagtattctgatcttgcttctctagcttgcatgtccaagtattctgcagggtgcatctattattatccatcattccactatactcacaatccttcacaagcagaaaagttacaaaaagacctaaaacggtatctcacaagaaaaattgggtttgaagctgttatgagaataaggtgtactaaaggtctttcaatgcacacttttcacggtaacttctttgtccgttctactgatttgttatcccttgccaacatcaatcctgatgctggatttgcggtgcagttgtcaattgaagaaagtttaacagatacttccttagtatgttttcaaacagccctattatatacatcaagcaaaggtgagcggagaattagagtacatacactttgtttgccagtggtaagttcactagcagatgtatatgcgggagtggatgtacaagctgccatctgccttctggcaaacatggctgtggatcggtccgtttcatcaagtctgtcagatgcaagagatgccttagtgaatgctgtagtggactcattgtctgcatatggctcaactgtctcaaatttacagcactctgcattgatggcgcccagctccctcaagttgtttcctctctatgttttggcccttctcaaacagaaagcatttagaacgggtacaagcacacggctggatgatcgtgtatatgccatgtgtcagataaagtctcagccacttgttcatctaatgaaaatgattcatcccaacttatacaggatagacagattgacagatgagggtgcagtacatgttaatgacaggattgtaccacagccacctcttcaaaaattgtctgcagagaagctgacaagagaaggtgctttccttatggactgtggctctgttttttacatttgggttgggaaaggctgtgacaataacttcatagaggatgtgcttggatatactaattttgcatcaataccacagaaaatgacacatcttccagagctagatacactttcatcagaaagagccagatccttcataacttggcttagagacagcagaccattaagtccaatccttcacatagtaaaagatgagagtcctgccaaagcagaattttttcagcatttgattgaagaccggacagaggctgcattttcttactatgaatttttgcttcatgttcagcagcagatttgtaagtgaagtagaataaaattgaataagaaaaagatctataacctaggtaaagcataatctgtcagagaagcgcgtgagaaatttgaaatgaaggcatttgttaatacaagatgcaacgcacagcactctgtctgaggctttggtaaaaagtaaaggggaagaaagaacttgacagatctttttcaactcaaattaatggtaacgatgatgctgtttcaccaagtatattttgaattggtttctacacatttccagtagtatggcagtacagtgctctgttcattgcaagctggcaaatttatgtagctatgtggaatgatatgtcataatgtaaaattagataaattcttttttcttataattaatataacatttctggacttgaactctggcaagagatgccaaaaggcattggtaccgtgttatttgtttatatgaattactttttaacaaggaatgtttcttattcattaaatgaattcaacattttctctgtaaaaacaatagagtttcagtacatgaactatagaaaaaaatctatatataatgtacataaatgttacatttgtaaagaaaatgtaaaaatgtaactatagcatatgaattgcttaaactgtgctgcattgttggatgacaactctttttgtcacagttagagaatgaggttgactaatgcatattatgaattgagtccacaaaggaacacaaaactctttgtaattctgttaaatcttttatgtagatttatttatgatcagcctactaattaaaactatttcgcttgacaaaaaaaaaaaaaaaa

SEQ ID NO: 336 - DNA, 2788 bp, Homo Sapiens
ggcggcggtagcagccaggcttggcccccggcgtggagcagacgcggacccctccttcctggcggcggcggcgcgggctcagagcccggcaacgggcgggcgggcagaatgagtctgcaggtcttaaacgacaaaaatgtcagcaatgaaaaaaatacagaaaattgcgacttcctgttttcgccaccagaagttaccggaagatcgtctgttcttcgtgtgtcacagaaagaaaatgtgccacccaagaacctggccaaagctatgaaggtgacttttcagacacctctgcgggatccacagacgcacaggattctaagtcctagcatggccagcaaacttgaggctcctttcactcaggatgacacccttggactggaaaactcacacccggtctggacacagaaagagaaccaacagctcatcaaggaagtggatgccaaaactactcatggaattctacagaaaccagtggaggctgacaccgacctcctgggggatgcaagcccagcctttgggagtggcagctccagcgagtctggcccaggtgccctggctgacctggactgctcaagctcttcccagagcccaggaagttctgagaaccaaatggtgtctccaggaaaagtgtctggcagccctgagcaagccgtggaggaaaaccttagttcctattccttagacagaagagtgacacccgcctctgagaccctagaagacccttgcaggacagagtcccagcacaaagcggagactccgcacggagccgaggaagaatgcaaagcggagactccgcacggagccgaggaggaatgccggcacggtggggtctgtgctcccgcagcagtggccacttcgcctcctggtgcaatccctaaggaagcctgcggaggagcacccctgcagggtctgcctggcgaagccctgggctgccctgcgggtgtgggcacccccgtgccagcagatggcactcagacccttacctgtgcacacacctctgctcctgagagcacagccccaaccaaccacctggtggctggcagggccatgaccctgagtcctcaggaagaagtggctgcaggccaaatggccagctcctcgaggagcggacctgtaaaactagaatttgatgtatctgatggcgccaccagcaaaagggcacccccaccaaggagactgggagagaggtccggcctcaagcctcccttgaggaaagcagcagtgaggcagcaaaaggccccgcaggaggtggaggaggacgacggtaggagcggagcaggagaggacccccccatgccagcttctcggggctcttaccacctcgactgggacaaaatggatgacccaaacttcatcccgttcggaggtgacaccaagtctggttgcagtgaggcccagcccccagaaagccctgagaccaggctgggccagccagcggctgaacagttgcatgctgggcctgccacggaggagccaggtccctgtctgagccagcagctgcattcagcctcagcggaggacacgcctgtggtgcagttggcagccgagaccccaacagcagagagcaaggagagagccttgaactctgccagcacctcgcttcccacaagctgtccaggcagtgagccagtgcccacccatcagcaggggcagcctgccttggagctgaaagaggagagcttcagagaccccgctgaggttctaggcacgggcgcggaggtggattacctggagcagtttggaacttcctcgtttaaggagtcggccttgaggaagcagtccttatacctcaagttcgaccccctcctgagggacagtcctggtagaccagtgcccgtggccaccgagaccagcagcatgcacggtgcaaatgagactccctcaggacgtccgcgggaagccaagcttgtggagttcgatttcttgggagcactggacattcctgtgccaggcccacccccaggtgttcccgcgcctgggggcccacccctgtccaccggacctatagtggacctgctccagtacagccagaaggacctggatgcagtggtaaaggcgacacaggaggagaaccgggagctgaggagcaggtgtgaggagctccacgggaagaacctggaactggggaagatcatggacaggttcgaagaggttgtgtaccaggccatggaggaagttcagaagcagaaggaactttccaaagctgaaatccagaaagttctaaaagaaaaagaccaacttaccacagatctgaactccatggagaagtccttctccgacctcttcaagcgttttgagaaacagaaagaggtgatcgagggctaccgcaagaacgaagagtcactgaagaagtgcgtggaggattacctggcaaggatcacccaggagggccagaggtaccaagccctgaaggcccacgcggaggagaagctgcagctggcaaacgaggagatcgcccaggtccggagcaaggcccaggcggaagcgttggccctccaggccagcctgaggaaggagcagatgcgcatccagtcgctggagaagacagtggagcagaagactaaagagaacgaggagctgaccaggatctgcgacgacctcatctccaagatggagaagatctgacctccacggagccgctgtccccgcccccctgctcccgtctgtctgtcctgtctgattctcttaggtgtcatgttcttttttctgtcttgtcttcaactttttttaaaactagattgctttgaaaacatgactcaataaaagtttcctttcaatttaaaaaaaa

SEQ ID NO: 337 - DNA, 4700 bp, Homo Sapiens
gtccgcccgggcgcggcccagtgaggcggtggccgagtcctctggcctcagacgcgtaggctggcagcccgctgagcccgccagactccgccgccgtcgggagccggccgctgggagcccgtcgctatgggaccgcgctgagccgcccgctggcgggggagcagcgcggtcgaggatggaggggccggcagagtggggccccgaggcggcgctgggccccgaggcggtgctgcgcttcctggcggagcgcgggggccgggccctgcacgccgagctggtgcagcacttcaggggcgccctgggcggcgaaccggagcagcgcgcccgcgcccgcgcgcacttcaaggagctggtgaacgccgtggccactgtgcgcgtcgatcccgccgacggcgccaagtacgtgcacctcaagaagaggttctgtgaagggccgtccgagccctccggggacccgccgcgaatccaggtgaccgccgagcccgaggcccccgacggccctgccgggcccgaggcgcgcgatcggctccccgacgcggcggccccggagtcgctccctggacagggccgcgagctgggcgagggagagccccccgcccccgcgcactggccgcccctgagcgccggggctcgcaggaagaactcgcggcgcgacgtgcagcccctaccgcggactccagccccggggcccagcgaggacctggagctcccgccacatggctgcgaggaggcggacaggggcagctcccttgtgggggctaccgcacagaggccggcccgccagaacctccgtgacctggtgatgggcagctccccgcagctgaagaggagcgtgtgtcccgggggcagcagcccgggcagctcctccgggggaggacgcggcagaggcgggggcgactcagacagcgcatcggtggcctcgtcgtccgcggaggaggagagcagcggcggaggctccgtgacgctggaccccctggagcacgcgtggatgctctctgcctccgatggcaagtgggacagcctggagggcttgctcacctgcgagcccggcctgctggtcaagcgggacttcattaccggcttcacttgcctgcactgggccgccaagcacggcaggcaggagcttctggccatgctagtcaacttcgccaacaaacaccagctgccggtgaacatcgacgccaggacgagcgggggttacaccgccctgcacttggcagccatgcacggccacgtggaggtggtgaagctgctggtgggggcctacgacgccgatgtggacatcagggactacagtgggaaaaaggcctcccagtacctgagtcggagcatcgccgaggagatcaagaacctggtgggagccctggacgagggtgacggggaaagcgccgcgggtagcggcggcgggcgctggaggctttcaaaggtgcttccctcgcatctcatcacctacaaactctcacacgccctagaagatggaggggaccatcaccaccatcaccactcggctgaggggtgggtcggaggcaaagccaaggatccagggcgcaaagcctcgggcagctctagtggacgtataaaacccagactcaacaaaatccgattcagaacccagatcgtccacaccacaccctctttcagggacccagagcagccgctggagggcaggggggaggagggagtgggggaggaacgacctgttaaaggccactcgcccttcacattgagaccaaagtccaatgtatttgggtaaaaattgcttcttttagaaaatgcaaaggtttatttgtcttaataaattgaatactaggtgttgtaaggaagtgagaccagaaggacaagctaaattatgcattcttacttgagggatcggaatggatggggcggagttctcttcaggctagccttctgggaaaagtggatgtctttttcagagattcatcataccttgacctgtacctcttctctgccctccacttccctgccctggagtccgtttctggagactagaaatgtatctaaattgggggaacagaatgaatgaattaatgaatgagagttcctttgctttaaccattcctggatgcctgcaaagtaaggaataatgcagtttttatgtatctgattttataaggggttactctttcaagagtaacaaaaaaatgcaaactgtaatgaaactacattgtatttctaagtgtgaaaacgacaggctgccccgtttttactaattgcatttgcattttaaggtactactgaaggtcagatcaaagttgaaatgcaaaaatactaattagagaataatgtgaataaaatgggaatcttcttggtattttatgtgtattgtaagtagcagttaaattatttttttaaaagcaatttcagttttaatcactgaacaaaagaaacaggcaacattcacttctgtagtatggtttccacctatctctaacaccactattaaggtacaccagtgttaaggtacattaataactacacaaaattttatttaaagagaacacttagcagcctatgatagttttcaataaaatgttgcctctctttcggattctcactaacttttgttactattctaaaagtttgaatttgctggggtgtttattctgaggattatttaaccattgttctatttggcataaccctatttaatggtgcttagagctgaattacctacagaaactgtttctggtttaaataattagcacaaattggcctaagtattcatgagcccatgtttctgtgaagtaattattaaaccaacttaatgattcttatgtaaggtacactttttattttaatacattggtagtctctatgacttgtagcaatgttttacaaatgtttaaaatgctaaacttaattttccaagcttttcttgacaattagatacctatcctgtagttactgaaaatctgggtagtaaatctacccaattaaaatggcactttataaaagggaatagagaagagatgggactatttctatatttaaatgctgctggctattcctttgtatataaatgaaaaataccattcattaaaattaagtactcgtttaagtatggttcttaattacatttcattcatttatattagagtaaatggcttcataactactttaaaatttaacccacaagcatattaaatctgtttgttataagattggaaacaatttttgagagggactaatttaaacaagtcctcctttagtcttttgggtcgcgtagttgctgaaacctaagtacctgcagcctacaggataaggaagttcacagcctgcggggtgaatgaacccatgtgtgaactgcacagagcaattcatagaaaatgcatagaaatttgtaacactttggtcacatctgtctctagatggtcattgaatttgtttaaagatggatgaaaggccaggcatggtggctcatgcctgtaatcccagcactttgggaggccgaggcaggtggatcacttgaggccaggagtttgaaaccagcctggccaacatggtgaaaacctgtctctactaaaaatacaaaaattagccgagcgtggtggtgcgtgcctgtagtcccagctacttaggaggctgaggcatgagaatcacttaaacctgagaggtggaggttgcagttgagccaagatcacgacactgcactccagcctgggcaacggagactctgtctcaaaaaaaaaaaaaaaaaagatgaatgaaaatatgaaatatataaactagtatccatttatttgcatttattgtgggatttcagatatgaacggtgtaaatttgagaagcacttatgcatacatgtgggtgaaaaaccaatctaattttgtataaataaaaacaggctcctggaaggtgaaaagtagtcatttgttctaaatctatacatattacttgtatctagtgcagaataagctataacatcccattgaggaatcttaaatttcatagacatgtaaagctgaagtaactctaaagagcagatgcttcagaaccatcagaaggttctggtcaacagtcagtattatctcttaaatgtatatgttggtcactaattgcacaaaatctataatttgccagggctttagagattgagtcaatatgtcatttaccatggttttcccactgaaggctttaacttttctgataaaataatattttaaattttcaaaaacccattcctgaggagaactacttctagcattccttttcatgatgtgcttttgtgcagtaagtagcattttcggctacttaactttacattcctcttatttttcagtttccagtcaagattataaaaagcaaatgattgatataatttgatattcatagagttgtgcctacctttaatggaaaaatacatgtcagatacttagatgtttattgatatgagactatgtggttaaaaaacccaagtatgtccatgtgtttcttataaggtacacttgaaactagtgagtgtttgtcacatttcactttcatggtatataaaatgcagtttgcatatataacttgaatatctggtactagttttttcacgcctgcaatcttggagtctaggttgccttgtctctcctatttttaaataagtgaaatttgggagattgtaaaatctgtaaagtttgttttgtgaaaataaaatgttcacagtaaaaaaaaaaaaaaaaaaaaaaaaaaaa

SEQ ID NO: 338 - DNA, 1589 bp, Homo Sapiens
agcgctcgagtgccgttgtcggctgcgccggaagtccctagccaggcctggcggtaaccttgggggcctcactgcagccgccgctgctgttggagtgggctttgcgagtctgaacgttggcggggctaggctcgttaactgccgagagcctccgggtttgcggtggaggacgctgaggcccgtggggggcaggcacccgggcgccgggcctcccagccgacatgtctctagtggcggaagccttcgtctcccagattgcaggctggagtgcagtggcacaacctgggctcactgcaacctccgcttcccgggttcaagcgattctcctgccttagcctcccgagtagttgggattacaggcgcccgccaccacgcccgcgcggattcatggaaaatttttaaatctgcatgtactttaaagaaatacttttgagtcggtggactgaacatgactgatgtatatagctgcagaaccttggcctgaaaatgctacattatatcagcaattgaaaggggagcaaattttactttctgacaatgcagcttctcttgcagtgcaggcctttttgcaaatgtgtaacttgcctatcaaagtagtttgtagggcaaatgcagaatatatgtctccatctggtaaagtaccttttattcatgtgggaaatcaagtagtatcagaacttggtccaatagtccaatttgttaaagccaagggccattctcttagtgatgggctggaggaagtccaaaaagcagaaatgaaagcttacatggaattagtcaacaatatgctgttgactgcagagctgtatcttcagtggtgtgatgaagctacagtaggggagatcactcatgctaggtatggatctccttacccttggcctctgaatcatattttggcctatcaaaaacagtgggaagtcaaacgtaagatgaaagctattggatggggaaagaagactctggaccaggtcttagaggatgtagaccagtgctgtcaagctctctctcaaagactgggaacacaaccgtatttcttcaataagcagcctactgaacttgacgcactggtatttggccatctatacaccattcttaccacacaattgacaaatgatgaactttctgagaaggtgaaaaactatagcaacctccttgctttctgtaggagaattgaacagcactattttgaagatcgtggtaaaggcaggctgtcatagagttatgtgttagtctcaggagtcttaacttttgaaatatgttttacttgaatgttacattagatattggtgtcagaattttaaaaccaaattactgctttttgaaacctcaaattatataatgtatcttatgtatgtgctttatattgttatttgtgtatacattaaaataattctgaattatttaatctgatatgttgtattctgtatcttgaaatttttgtttccttgaaacatgcatgcatttaaaaataaagcttaaacaactgtatggatgttacatttactttcttttgatttttctgaaagtcattcactgaattttacacatgtggaataaacagtgtcttttctaaggcaaaaaaaaaaaaa

SEQ ID NO: 339 - DNA, 2878 bp, Homo Sapiens
gctgcccctcttttgaagcggttttcgtctctttccgccagtggcctcccagctcacgcaggggcgggtcccggtagcgcgaggcggtgcagggcgggaaggggagtggtggcggctgcggcagtagggacagcaggagcagtggtgctgtcagcgcggccgtcggagacatgggagacccggggtcggaaataatagaatctgtccctccagctggccctgaggcatctgagtcaacaacggatgaaaatgaagacgacattcagtttgtcagtgaaggaccatcgagacctgttcttgaatacatcgatctggtctgtggtgatgatgaaaaccctagcgcctattatagtgatattctgtttcctaaaatgccaaaacgacagggtgattttttgcattttttaaatgtgaagaaggtgaaaacagacacagaaaataatgaagtgagcaaaaatcactgcagattgtctaaggcaaaggaaccacatttcgagtatattgaacaaccaatcattgaagaaaagccatcactttcatcaaagaaagaaatagataatcttgtgcttccagattgttggaatgaaaaacaagcatttatgtttacagaacaatacaaatggcttgaaataaaagaaggtaaattaggatgtaaggattgttcagcagttcggcatttgggatcgaaagcagaaaagcatgtccatgtgtccaaggaatggattgcatatttagtaacccctaatggcagtaataaaactactaggcaagcttctctacgaaaaaaaattagggaacatgatgtttctaaagcccatggtaaaattcaggatttgttaaaggaatcaactaatgattcaatttgtaatttagtgcataaacaaaataataaaaatattgatgctactgtaaaagttttcaatactgtttacagtttagtaaaacataacagacctttatctgatattgagggggcaagagaattacaggaaaaaaatggagaggtaaattgtttaaatacacgttacagtgcaacaagaatagcagaacatattgcaaaagaaatgaagatgaagatatttaagaatattatagaagagaatgccaaaatctgtatcataattgatgaggcatctacagtttcaaagaaaaccaccctagtgatttatctccagtgcacaattcagtcagctcctgcacctgttatgttatttgtggctttaaaagaattggtgtcaactatagcagagtgtattgtcaatacattattgactactttaaatgattgtggttttacaaatgaatatttgaaagcaaatttaattgcattttgttctgatggtgctaatacaatcctgggaagaaagtctggagtagctacaaaattgttagaaaattttcctgaaatcatcatttggaactgtttaaatcatcgattacaattgtcacttgatgattctatatccgaaataaaacaaattaatcatttaaaaatatttattgataaaatttattctatttatcatcaacctaataaaaatcaaaccaagcttctaggaactgtagctaaagaacttgaaactgaaattattaaaattggtcgagtaatgggaccaagatgggcggcatgtagtttacaagctgctactgctgtatggcatgcatatcctatattatatatgcatttttctcattcttactctggtttggcgaagagattagctaacattaatttcttacaagaccttgctttaatgattgacattcttgaagaattttcagtactttcaactgcattacagtcaagatcaactaatattaagaaagcacaaaaattgatcaaacgtaccataagagctttggaaaatttaaaaattggtactggaaagtatgaatctcaaattgaagatttgatcaagtcagataagtttaaagatattccatttaataaaaacaataaatttaatgctcttcctaggagtatattactagacaatataattcagcacatgaacctacgccttttatctgacagaaaccatgaagatatttttaattactttgatttgctggaaccttccacatggccttatgaagaaataacttcaccatggatagctggtgaaaaaacattatttcatttgtgtaaaattttaaaatatgaagttgatttgaatgattttcgggaatttgtaaataataatataaaatcaaacaatgtttcaattcctacaactatatacaaagctaaaaagatagttagcaccattgcaatcaatagtgctgaagctgaaaggggtttcaatttaatgaacataatttgtacaagggtgagaaatagtttaacaatagatcatgtatcagatttaatgacaataaatttactggggaaagaattagcagattgggatgcaacaccgtttgtaaaatcttggtcaaattgcaaccacaggttggctacagatacaagagttcggcaaaagtcaacaaaagtcttccatgagaatcaattggctatatggaacttaaaatagaatattgtatacgttttttgtcatctgtaaattatgtactacacatcctttatatacataaaggtcttttttttttggaaagccagttaaacttttatcagcatgttgctgtttaaaaggcgttctttaagaagataatcttgaagattggttttagaagctatagttttttagagattggcccatgtttgctagagtgggtcataatacatattccatgaagttctgtacagaacaaacaccgtttataattttgtactgttttactttaagtaaggatgcaaaaaatagcaggactcagctaagttctaagccctggaggttatattaaaaaaaaaaaaaaa

SEQ ID NO: 340 - DNA, 6321 bp, Homo Sapiens
ggaaaaaaaggaaggcgtgagggcgggcagcagcgacaggatgcttgtttttcgctctaccaaagtcgtctgaaggcgagacagcgggcccagggcgcaggacccaccgcagccccctgggcagtctcctcgccccgcgtccgcgtcgtctccggggcacttagtaaggggtggggagagcttgccctccctcttaagctgaggagaaacacccgaagacaccgcaggagcctgtgaaagtccctaggactccaagtgaggaagtgacactcccaggcgagccggcccgcggctgccagtctgcacggcctcggcacggcggccccggagcggcgcggggtggatctcaggctctgccggcccgcggcccgcggggtccatgcgcagggcccccagcccaagttcttccatcttccgatgcggccccccagagccgcggggcagccggtgatctagcccgggagcccatcttacagcggtgccaagcagaggggcggcagagacggaggggcagcctctttgggactaactcatgaagaacaagggtgctaagcagaagctgaaacgaaagggagccgccagcgcgtttggctgtgacctgacggagtatctggaaagctcgggacaggatgttccatacgttttgaagagctgtgcagaatttatagagactcacggcatcgtggatggaatctatcggctttcaggagtcacctcaaacatacaacggctaaggcaagagtttggctcagatcaatgtccagatctgacaagggaagtgtacctccaggacatccactgtgtgggctcgctttgcaagctctactttagggagctgcccaaccccctcctgacttatgagctctatgagaaattcacggaggcagtgtcgcattgccctgaagaaggccaactggcccgaatccaaaatgttatccaggagcttcctccatcccactataggaccttggaatacctgattcgacacctggcccatatcgcctccttcagcagcaagaccaacatgcacgcccggaacctggccctggtgtgggcgccaaacctcctcaggtctaaagaaattgaagccactggttgcaatggagatgcagccttccttgcagtccgggtccagcaggtggtgattgagttcatattgaatcatgtagatcaaatctttaacaacggtgcacctgggtctctggagaatgatgaaaaccggcccatcatgaagagcctgaccttgccagccctctccctgcccatgaagctggtgagccttgaggaagctcaagcccgcagcctggccactaaccatcctgctcgcaaggaaaggagggagaacagcctgcctgagattgtccctcccatgggcaccctcttccacactgtccttgagttaccagacaacaagcgaaagctctccagtaaatcaaagaagtggaaatcaatatttaacctgggacgttctggatcagactccaaatcaaaactgagtagaaatgggagtgtatttgtgagaggacagaggctctcggtggaaaaggctactatccgaccagctaaaagcatggactcactatgttcagtgcctgtggaaggaaaagaaaccaagggaaatttcaatcgaacagttaccaccggtggatttttcattccagcaacaaagatgcactccaccggcaccggcagctcatgtgacctcaccaagcaggagggcgaatggggccaggaggggatgcctcccggggctgagggtggctttgatgtgagcagtgatcgcagccatctccagggcgctcaggcccggcccccaccggaacagctgaaggttttccggcctgttgaggatccggagagcgagcaaacagccccaaagatgttgggtatgttctacacttcgaacgacagccctagcaaatccgtcttcaccagcagcctcttccagatggagccctcgccgcgtaaccagcgcaaggcgctgaacatctccgagccctttgcggtatctgtgccgctccgcgtgtccgcagtcatcagcaccaacagcacgccgtgcagaacacccccgaaggagctgcagtctctttccagcctggaagagttttcttttcatggatcagagagcggaggctggccagaagaagagaaaccgctgggagctgagacttctgcagcttctgtacctaagaaggcaggtcttgaggatgccaaggcagtacctgaagcaccagggacagtggaatgcagcaaaggcctgtcccaggagccaggcgcccacctggaggagaagaaaaccccagaaagctccttgagctctcaacatttaaatgaattagagaagaggccaaatccggagaaggtggtggaggagggacgagaggctggtgagatggagtccagcaccctgcaggagagccccagggccagagccgaagctgtgcttctccatgagatggatgaagatgatctggccaatgccctgatctggcctgagattcaacaggagctgaaaatcattgaatctgaggaggagctctcatcgttgccacctcctgctctgaagaccagcccaattcagcctattctcgagtcgagtctggggccctttattccctcagagcctcctgggagcttgccttgtggctccttccctgctccagtctccacccctctggaggtgtggactagggatccagccaatcagagcacacagggggcttccacagcagccagcagagagaagccggaacctgagcagggcctgcacccagacctcgccagcctggctcctctggaaatagttccttttgagaaggcatctccacaagcaacagtggaagtaggaggcccaggcaatctgtctcctccactcccacctgctcctccccctccaactcctctggaggagtcaactccagtcctgctttcaaagggcagcccggaaagagaagactcatccaggaaattgaggacagatctctacatagaccagctgaagtcccaagacagccctgagatctctagcctctgtcagggagaggaggcaaccccaagacacagtgacaagcaaaattcaaagaatgctgcttctgaggggaaaggctgtggttttccaagcccaaccagggaggttgagatcgtctcacaagaagaggaggatgtaacccattcagtacaggagccttcagactgtgacgaagatgacactgtgacagacattgcccagcatggcctggagatggtggagccctgggaggaaccccagtgggtgacgagtccccttcactctcccaccctgaaagacgcgcacaaggcccaggtacagggccttcagggtcaccagttggagaagaggctttcccacaggcccagccttcgccagagccattctctagatagcaaacccacggttaaaagccagtggactctcgaggttccctcctccagcagctgtgctaatcttgaaacagagaggaattctgaccctcttcagccccaggcacccaggagagagattactggatgggatgagaaagccctgaggtccttcagagagttctctggcctgaaaggggcagaggctcctcccaaccagaagggaccaagtggtgtgcaacccaacccagcagaaaccagccccatcagcctagcagagggaaaggagctagggacacacctggggcacagcagtccacagattaggcaaggtggtgttcctgggccagagagcagcaaggagagttcacccagcgtgcaggacagcacttcgcctggagagcaccccgcaaagttacagctaaagagcacagagtgtgggcccccaaaagggaaaaacaggccttcttccctcaacttggaccctgccattcccattgctgacctcttctggtttgagaatgtggcctcatttagttcacctggaatgcaggtctctgagccaggagacccaaaggtcacatggatgacctcatcttactgtaaagcagacccctggagggtttactcccaggacccccaggacctggacattgttgctcatgcactgacaggccgccgtaactcagctcctgtgagtgtgtcagctgtgagaacctccttcatggtcaaaatgtgccaggccagggcggtcccagtcatccctcccaagattcagtacacccagatcccacagcccctgccctctcagagctcaggggagaatggggttcagcctctggagaggagccaggagggacccagctcaaccagtgggaccactcagaaacctgccaaagatgattctccctcctccctggaaagctcaaaggaagaaaaaccaaagcaagatcccggagccattaagtcctcaccagtggatgccactgcaccctgcatgtgcgagggacctaccctttctccagaaccaggctcgtctaacctgctctccacccaggatgcagtagtgcaatgcagaaagcgcatgtcagagacagagccatctggggacaaccttctttcttcaaaactagagcgaccatctgggggttctaagcctttccacaggtcaaggccaggaagacctcagagcctaatcttattcagtcctcctttccccattatggaccacctgcccccttcatccacagtgacagattccaaggtcctgctgtcccctatcagaagtcccacccagacagtttcccctggccttctttgtggagagttggcagaaaacacatgggtcacaccagaaggggttacacttaggaataaaatgaccatccctaagaatggccagagactagagacctcaaccagctgtttttaccagcctcagcggagatcagtaattctggatggaagaagtgggaggcaaatagaatgatttcggttcacctgctggtgtctgaaaaaaaccgtgattcatctggaagttattacagggccagcttgccatattccaggcacacgttatcaagtttgggcctattgtggcctctgacttctctttcttcagccttttgaccacttattaattagtccatttgctagaagagtggtcaagggaaaaacgagagatgaaatttagttaagtctatgtgagcaagtgagagaaggttaggtaaggggagaggatggaatgcttgcctccaatgaactttggagcttgtatgtgagtcagattgctcccctattgctattatctattactcttgagagctggctgtcctttgaaagaaagaagtaatgttctttgaaagaaagaaaaatctcttgctgtgtcaaacctcaaaatgttgctattggggttagaaggcctcctctttatgctttttaatgctctttcaaacgtgttcttttagaccagttttctaataagctttgtaaaatgtactatccaaattagaagcggatttggaaatgcaaactaacgtgcacttagatatccaagtgggtgagcttagccactcttacccatgctctttccctggaatccctggagacctgtccaagatgatttccatataccagcatagaaaatcagaatcaagagcaaactctgagactggcacaatccaagaagatttcctggctctggcttttagtaatttgggactccaactgccactgtactggactgtaatttataaatccagtagctacgcagggtggaggctgggctgaggattaccataatgaaatgtactaaatcttcatttaggtatgcaattgtgaagtgaaggcatctgctttctttacagtatcagagtccaagaacaggatgtcaccatagataaaagcctcatacaaaggcagaactacactccaaatttaatgtgtttaaattggtggggcaccagcagaaaatacttctagctcagctttactcttcttccacactaggctgggcccagcaatacaggagaggatgaagggaggagctccaggaggcgagggaagagccctagcagggcggccatcacaaccactcactgagagttgcccttcttaaaaatgtattttattttagccagtgggtcccttcctttctcctttcctctctactgctcaagaacagatttgaggccaggtgcggtgcctcacatctgtaatcccaacactttgggaggctgagatgggtggattgcttgagcccaggagttcaagaccagcctgggcaacacagcgagaccccatctcttaaaaaataacagacttgaggaacccctctcccttccataattcccctcatccaccgcccactccaggcactcactcaaacttgctcttcaactctgtatacaagcagaagcaataaaccaatctgattttcttttc

SEQ ID NO: 341 - DNA, 1500 bp, Homo Sapiens
aagcggcgcaccgttaagatggcggctgggctgcggaaacgcggccggtccggttccgcggcccaggcagagggactctgcaagcaatggctgcagcgcgcctggcaagagcggcgcctgctgctgcgggagccgcgctacacgctgctggtggccgcctgcctctgcctggcggagacacagagattgactggaaggcctacatggccgaggtagaaggcgtcatcaatggtacctatgactatacccaactgcagggtgacaccggaccacttgtgtacccagctggtttcgtgtacatctttatggggttgtactatgccaccagccgaggcactgacatccgcatggcccagaacatctttgctgtgctctacctggctaccttgctgcttgtcttcttgatctatcaccagacctgcaaggtacctcccttcgtctttttcttcatgtgctgcgcctcttaccgtgtccactccatctttgtgctgcggctcttcaatgacccagtggccatggtgctgctcttcctcagtatcaacctcctgctggcccagcgctggggctggggttgctgctttttcagcctggcagtctctgtgaagatgaatgtgctgctcttcgcccctgggttactgtttcttctcctcacacagtttggcttccgtggggccctccccaagctgggaatctgtgctggccttcaggtggtgctggggctgcccttcctgctggagaaccccagcggctacctgtcccgctcctttgaccttggccgccagtttctgttccactggacagtgaactggcgcttcctcccagaggcgctcttcctgcatcgagccttccacctggccctgttgactgcccacctcaccctgctcctgctgtttgccctctgcaggtggcacaggacaggggaaagtatcttgtcgctgctgagggatccctccaaaaggaaggttccaccccagccccttacacccaaccagatcgtttctaccctcttcacctccaacttcattggcatctgcttcagccgctccctccactaccagttctacgtctggtatttccacacactgccctacctcctgtgggccatgcctgcacgctggctcacacacctgctcaggttgttggtgctggggctcatcgagctctcctggaacacatacccttccacatcctgcagctctgctgccctgcacatatgccatgccgtcatcctgctgcagctctggctgggcccgcagcctttccccaagagcacccaacacagcaagaaagcccactgaagtccacccctttccctcaggacctgagtctaccctcaggacctggggttggttggactctgcccttccaaataaaccttgctaagtccaactctgtgcaacctacatggaggtgggggcagccgatgcctggtccaggctgtgagggacacgtatggagcagataaagaattcactcaagcagtaaaaaaaaaaaaaaaaa

SEQ ID NO: 342 - DNA, 3162 bp, Homo Sapiens
agaggaagtgacgtacgtccggtgtaatggcggcgcggtggagctctagtaggtgatgtttgcagacagaaaaagtaaactgtcaaggaattcagagcattgggtacttgttatttggaccagtttgaagcatctttgatttattggaccaactggcaacagaaaatgaaaagtagtgtggcacagataaaaccttcttctggtcatgacagaagggaaaaccttaattcatatcagaggaactcctctccagaagacagatatgaagaacaagaacgatccccccgggatagagattactttgattacagcagatcagactatgagcattcaagaagaggacgttcttatgatagtagcatggagtcacgaaacagggaccgagaaaaacgcagagaaagagaaagagatacggatcggaaaaggtctcggaaatccccatctcctgggaggagaaacccagaaacatcagtaactcagagttcctctgctcaggatgaacctgctacaaagaaaaagaaagatgagctggatcctcttcttactcgcactggtggagcatatattccccctgcaaagctcaggatgatgcaggaacagattacagataaaaacagcttagcataccagaggatgagttgggaggccctgaagaagtcaattaatggccttatcaacaaagtcaacatttccaacataagtattattattcaagagcttcttcaagaaaatatagttagaggaagaggactgctgtccaggtctgttttgcaagcacagagtgcttctccaatcttcacccatgtttatgcagcattagtggcaattatcaactcaaaatttccacaaattggagaattaatcctcaaaaggttaattcttaattttcgaaaaggctatcgaagaaatgacaagcaactttgcctgactgcttcaaaatttgtggcgcatcttattaaccaaaatgtggcacacgaagtattatgcttagagatgctcactttgctcctggaaagaccaacagatgatagcgttgaagtagctattggttttcttaaggaatgtggcctcaaattaacacaagtgtcaccaagaggaatcaatgctatatttgaacgccttcgaaacattctgcatgagtctgaaattgacaaaagagttcaatatatgattgaagtgatgtttgctgtacggaaagatggattcaaggaccaccccattatcctagaaggtcttgatttggtggaagaagatgatcaattcactcatatgctccctctggaggatgactataatccagaagatgttcttaatgttttcaagatggatcctaattttatggagaatgaagagaagtacaaagctattaagaaagaaattcttgatgagggagatactgactcgaacacagaccaggatgctgggagtagtgaagaggacgaggaagaagaagaggaagagggagaagaagatgaagaaggacaaaaagtaactattcatgacaaaacagaaattaacctggtctcatttcgtcgtacaatttatcttgctattcagtcaagtttagattttgaagaatgtgctcacaaattgctgaaaatggagtttcctgaaagccaaacaaaagaactctgcaacatgatacttgattgctgtgcccaacagaggacatacgaaaaattttttggcttattagctgggcgattttgcatgctaaagaaagagtacatggaatcctttgaaggtatattcaaagaacagtatgataccatccatcgcttggaaacaaacaagttgcgaaatgttgctaagatgtttgctcaccttttatacactgattcacttccatggagtgttcttgaatgtataaaactgagtgaagaaaccactacatcatccagtagaatttttgtcaaaatatttttccaggaactgtgtgaatacatgggtcttcctaaacttaatgcaagattaaaggatgaaactctgcagccattctttgaaggattattaccccgagataatccaagaaacactcggtttgccatcaacttctttacttctataggtcttggaggtttaacggatgaactgcgggagcatctcaaaaatacaccaaaggtcattgtggcgcagaaaccagatgttgagcaaaataaatcctccccatcctcttcctcttcagcgtcctcctcttcagagtctgactcatccgactctgattctgacagcagtgatagcagttcagagtcttccagtgaagagagcgactcttcatccatcagtagtcatagctctgcctcagctaatgatgtaagaaagaagggacatgggaagaccagaagtaaagaggtagataaattgatcagaaaccagcaaacaaatgataggaaacaaaaagaaagaagacaagaacacgggcaccaggaaacaaggactgagagagaaagaaggtcagaaaaacacagagatcaaaattcaagtggttcaaattggagagatcctataacaaagtacacatcagacaaagatgttccttctgaacgaaataactacagtagagttgcgaatgacagagaccaagaaatgcatatagatttggaaaataagcatggtgatcccaaaaagaagagaggagagagaagaaattctttttctgaaaatgagaagcatacacaccgaattaaagacagtgaaaatttcagaagaaaagatagatcaaagtcaaaggaaatgaatagaaagcactcaggctcaagaagtgatgaagatagatatcaaaatggtgccgagagacgatgggaaaaatctagcagatactctgaacaatccagagaatcaaagaaaaatcaggaccggcgaagagaaaagtctccagcaaaacaaaaataattctacaaaatgacataaactggacatgccttatattcagttgaaacaaattattttttactttgacgaactttatagagaattcttgtataaagtattggtttgtatttgtaaatttaaaaaatgttttcattttaacatgttttataattgatacatctcaaggccctacccataaaattatttgaaaactttcaccagaaagggatgtaagtctcgcttatattttgtgaataaaatgatcaaaagctcaaaaaaaaaaaaaaaaaa

SEQ ID NO: 343 - DNA, 5160 bp, Homo Sapiens
cccgagtgtcggttcactgtggagacagcggtggcggagtgggtctccagggctctgggctggcaaggcccccggagggggtggggcgcggaggaggctacggatccgcttccgcgcggcggggccgggtgcttgggacgcggctctgggctcccgggataaggggctcccgggacaaggggctcccggagagcccagtggttagcgatgctgctgtcgccgtcgctgctgctgctgctgctgctgggggcgccgcggggctgcgccgagggtgtggcggcggcgcttacccccgagcggctcctggagtggcaggataaaggaatatttgttatccaaagtgagagtctcaagaaatgcattcaagcaggtaaatcggttctgaccctggagaactgcaagcaagcaaacaagcacatgctgtggaaatgggtttcaaaccatggcctctttaacataggaggcagtggttgcctgggcctgaatttctccgccccagagcagccattaagcttatatgaatgtgactccaccctcgtttccttacggtggcgctgtaacaggaagatgatcacaggcccgctgcagtactctgtccaggtggcgcatgacaacacagtggtggcctcacggaagtatattcataagtggatttcttatgggtcaggtggtggagacatttgtgaatatctacacaaagatttgcatacaatcaaagggaacacccacgggatgccgtgtatgtttcccttccagtataaccatcagtggcatcatgaatgtacccgtgaaggtcgggaagatgacttactgtggtgtgccacgacaagccgttatgaaagagatgaaaagtggggattttgccctgatcccacctctgcagaagtaggttgtgatactatttgggagaaggacctcaattcacacatttgctaccagttcaacctgctttcatctctctcttggagtgaggcacattcttcatgccagatgcaaggaggtacgctgttaagtattacagatgaaactgaagaaaatttcataagggagcacatgagcagtaaaacagtggaggtgtggatgggcctcaatcagctggatgaacacgctggctggcagtggtctgatggaacgccgctcaactatctgaattggagcccagaggtaaattttgagccatttgttgaagatcactgtggaacatttagttcatttatgccaagtgcctggaggagtcgggattgtgagtccaccttgccatatatatgtaaaaaatatctaaaccacattgatcatgaaatagttgaaaaagatgcgtggaaatattatgctacccactgtgagcctggctggaatccctacaatcgtaattgctacaaacttcagaaagaagaaaagacctggcatgaggctctgcgttcttgtcaggctgataacagtgcattaatagacataacctcattagcagaggtggagtttcttgtaaccctccttggagatgaaaatgcatcagaaacatggattggtttgagcagcaataaaattccagtttcctttgaatggtctaatgactcttcagtcatctttactaattggcacacacttgagccccacatttttccaaatagaagccagctgtgtgtctcagcagagcagtctgagggacactggaaagtcaaaaattgtgaagaaagacttttttacatttgtaaaaaagcaggccatgtcctctctgatgctgaatcaggatgtcaagagggatgggagagacatggtggattctgttacaaaattgacacagtccttcgaagctttgaccaagcttccagcggttattactgtcctcctgcacttgtaaccattacaaacaggtttgaacaggcttttattaccagtttgatcagtagtgtggtaaaaatgaaggacagttatttttggatagctcttcaggaccaaaatgatacgggagaatacacttggaagccagtagggcagaaacccgagccggtgcagtacacacactggaacacacaccagccgcgctacagtggtggctgtgttgccatgcgaggaaggcatccacttggtcgctgggaagtgaagcactgtcggcactttaaggcaatgtccttgtgcaagcagccagttgaaaatcaggaaaaagcagagtatgaagagagatggccctttcacccctgctatttggactgggagtcagagcctggtctggccagttgcttcaaggtatttcatagtgaaaaagttctgatgaaaagaacatggagagaagctgaagcattttgcgaagaatttggagctcatcttgcaagctttgcccatattgaggaagagaattttgtgaatgagctcttacattcaaaatttaattggacagaagaaaggcagttctggattggatttaataaaagaaacccactgaatgccggctcatgggagtggtctgatagaactcctgttgtctcttcgtttttagacaacacttattttggagaagatgcaagaaactgtgctgtttataaggcaaacaaaacattgctgcccttacactgtggttccaaacgtgaatggatatgcaaaatcccaagagatgtgaaacccaagattccgttctggtaccagtacgatgtaccctggctcttttatcaggatgcagaatacctttttcatacctttgcctcagaatggttgaactttgagtttgtctgtagctggctgcacagtgatcttctcacaattcattctgcacatgagcaagaattcatccacagcaaaataaaagcgctatcaaagtatggtgcaagttggtggattggacttcaagaagaaagagccaatgatgaatttcgctggagagatggaacaccagtgatataccagaactgggacacaggaagagaaagaactgtgaataatcagagccagagatgtggctttatttcttctataacaggactctggggtagtgaagagtgttcagtttctatgcctagtatctgtaagcgaaaaaaggtttggctcatagagaaaaagaaagatacaccaaaacaacatggaacgtgtcccaaaggatggctatattttaactataagtgccttctgctgaatatccccaaagacccaagcagttggaagaactggacgcatgctcaacatttctgtgctgaagaaggggggaccctggtcgccattgaaagtgaggtggagcaagctttcattactatgaatctttttggccagaccaccagtgtgtggataggtttacaaaatgatgattatgaaacatggctaaatggaaagcctgtggtatattctaactggtctccatttgatataataaatattccaagtcacaataccactgaagttcagaaacacattcctctctgtgccttactctcaagtaatcctaattttcatttcactggaaaatggtattttgaagactgtggaaaggaaggctatgggtttgtttgtgaaaaaatgcaagatacttctggacacggtgtaaatacatctgatatgtatccaatgcccaataccttagaatatggaaacagaacttacaaaataattaatgcaaatatgacttggtatgcagcaataaaaacctgcctgatgcacaaagcacaactggtcagcatcacagaccagtatcaccagtccttcctcactgttgtcctcaaccggctaggatatgcccactggattggactgttcaccacagataatggtcttaattttgactggtctgatggcaccaaatcttctttcactttttggaaagatgaggagtcctccctccttggtgactgcgtttttgccgacagcaacggacgctggcatagcacagcctgcgagtcatttctgcaaggtgccatttgtcatgtgccacctgaaacaagacaatctgaacacccagagttgtgctcagaaacatctattccctggataaaatttaaaagtaattgctacagtttttctacagtcctagacagtatgagttttgaggctgctcatgaattttgcaaaaaggaaggttctaatcttttaacaatcaaggatgaggctgaaaatgcatttctcctagaagagctgtttgcttttggttcttctgtccagatggtttggttgaatgctcaatttgatggtaacagtaagtgatttgggtagaggagaggacataaataaatacatggttgttaaagctgatgataatggcatctgtgagccagaaaactctccttggatacgttttctgagaaaaaatagcatgaagcctaaagccatttcttccaaaaacaacattgcaacccttttctttacccttttgtcttttaaaataatcccagaacaccaaaaataaaaacaaacaataacatgtttatctttacccttagcaggaagatgcttggctggaactttgtgttcacagacttagtcattgcataccaaaaccatatttactggaaaatatcccaggtttctaaatgttataaaagcacaatagagttatggaaatgtttccatgatgaactgtgctgttaggattcttatttgctactcataaaaaccagagtttgtaataaaatggaagcatggtattcttttctttatgtaattgatggttattgaaaggtacttgtgaagaaaattattttaattggtatggagagcttgttacagtggtgtaccaaggttgggggtgagcctaccctttcgaggaggagtattttaatcaccaacattgtttagaatttcaagcagatggtgataataaaaagcagaccaacttttagttagctgtattgttagttttaaattattttcagacaatacactattgcccacacatgggatggactctcctaccgcccctacccccttggtacatggctggcttggtattaaagaaattcactgtaaaatctttttagaaagtgagccattttgtaatgatgaagatgttaggacttcaaaggatttttctttactcgattagttttgtttatcaaatgatttctttaaatcgattatatatatatatggaatatttcaaaattcaaactgtcacattaagaaacatgataacctaaatgacctaaataagaacactgtacctaaaataaagaggcaacttta

SEQ ID NO: 344 - DNA, 4652 bp, Homo Sapiens
gtggccgcgctcggcgctgccatgttgaggagccgccgctgccgttgccgccgccgccgccgccgctttgttgtcgcctcctccggctgaggaggctccccgagcggggggagtggggaggaggggggtcggccgccgcagccatggaggccaactggaccgcgttcctgttccaggcccatgaagcttcccatcaccaacagcaggcagcacagaacagcttgctgcccctcctgagctctgccgtggagccccctgatcagaaaccattgcttccaataccaataactcagaaacctcagggtgcaccagaaacattaaaggatgccattgggattaaaaaagaaaaacccaaaacttcatttgtgtgcacttactgcagtaaagctttcagggacagctatcacctgaggcgccacgaatcctgccacacagggatcaagttggtgtcccggccaaagaaaacccccaccacggtggttccccttatctctaccatcgctggggacagcagccgaacttcgttggtctcgaccattgcaggcatcttgtcaacagtcactacatcttcctcgggcaccaaccccagtagcagtgccagcaccacagctatgccagtgacccagtctgtcaagaaacccagtaagcctgtcaagaagaaccatgcttgtgagatgtgtgggaaggccttccgagatgtgtaccatctcaatcgacacaagctctcccattcagatgagaaaccctttgagtgtcctatttgtaatcagcgcttcaagaggaaggaccggatgacttaccatgtgaggtctcatgaaggaggcatcaccaaaccctatacttgcagtgtttgtgggaaaggcttctcaaggcctgaccacttaagctgtcatgtaaaacatgtccattcaacagaaagacccttcaaatgccaaacgtgcactgctgcctttgccaccaaagacagactgcggacacacatggtgcgccatgaaggcaaggtatcatgtaacatctgtgggaagctcctgagtgcagcatacatcaccagccacttaaagactcatgggcagagccaaagtatcaactgtaatacatgtaaacaaggcatcagtaaaacatgcatgagtgaagagaccagtaaccaaaagcagcagcagcagcagcagcagcagcagcagcagcagcaacaacaacaacaacaacatgtgacaagctggccagggaagcaagtagaaacactgagactgtgggaagaagctgttaaagcaaggaagaaagaagctgctaacctgtgccaaacctccacggctgctacgacacctgtgactctcactactccattcagtataacatcctctgtgtcgtctgggactatgtcaaacccagtcacagtggcagctgcaatgagcatgagaagtccagtaaatgtttcaagtgcagttaacataaccagcccaatgaacatagggcatcctgtaactataaccagtccattatccatgacctctcctttaacactcactaccccagtcaacctccccacccccgtcactgccccagtgaatatagcacaccctgtcaccatcacatctccaatgaatctacccacacctatgacattagccgcccctctcaatatagcaatgagacctgtagagagcatgcctttcttgccccaagctttgcctacatcaccgccttggtaaacagtattataaaatcaaaatatgggtaaaagtaaatatttaccagcaacttaacttttagttgattaaagcaaaaagtaaaccatgaaattgggagattttattacattagttaataagagtgtggtagcatttttctccaatttggctgggattattcaaagtagggtgtgtatgtaacttatcactggaccactttagtttaatcagaaattccttttagctgacaacattgcttaaacaggatagtagttggcaagatgaaatgccagaattaaaaccaatcataagtagaacccacttcaaaataaaaaaacagcattactatttctaatcccaaggaatcactttattgtaaacactagcagaactcttctccctatacaaggtggatggctgattttaacctgaaattttaaatccacagattgagagctagtgtagaattgtctgtgtttattgtttttatgagtaaatacatgcattgtcataataaaatgcatttcagagaatatgcattttacctttgggaatatgttaatttcaggcagcattccctatgggaaaggtgataccagctctgatatgcaaagcatatgataatttatcattctaacttcaacgtataatagggattgtgacctgatatttggagatgtaaatattgctcagcatattaatcccgatggaatatagcattgtagttgactttttaaaaaaaaaaaaaatttaaaaaaaatctacaaattgtgttttgctaagaaaagcctcaactgacagaggagaagtcaagtgtgtggacaggcaagctcctaataaacagagtccagtgggattcctatttaggagccaaggagtactttggaacagtacaaatatattgctttaaattggaagacgctggaggcactgggatgtgatatgcccctctctctcccaatcagagcctgttgatattacaacagggacagatgtgttagttgctcactagagtttatgtcttatattaaattgtatacagtttttattctaaccactaactaggtagtgtatgccccttcagaacatgcagagtgtatctttttttaaatttctccttccgtttcttaagtattgcgcagatttgttcaactttgtaaatatggacatcactttttttttctttgagaaaacacttgtatcagctttgtggtgttttcagggagacagctgtctgcattccctgtagaaacccagcaatgattatgcacgttgagacatgtgctttttatttcttagcaagatattttatctctgtacataaagtagaaaccaaaagctagggaaacagatactctttacaccatcatgccacgcattgtttttaaagcattgcgttaaaaaaaaaattaactaaaccaagatgctgtgattttttaagttgcaatatgtttttggtttttttcattttttaatcattgcagttaagagaaatggaaattagttgtgttaatcttgcagaatgtttgcaggactgactatcaaactggatgatttccatttataccctactgtgtcagttcaagcatcaaaataccttgcatctgagacagacttcctacatcagggacaggtatctgtgtgtcattatacaaaacagttctagggggttgaactacatagtaaaaaaataaaataaatagtacttagtgtaaaataattttataaatgatcttttgtactttaggacattaaattgtacaacttttgtatatataaaagcttaggaactttctgtttagcaggaaggcaacacattcctacacttttaatgtatatgtttgttataatgtccatgtaaacatgccctatgtttgtgccttttaattagtttgtctcaataaacaaaatgtagagaaaaatatgtagctatgactttgttacaactgttcttatccacagtacaaaaatggtttgtttttaatatgtagagcattatgtgtggactactggaaggactcgtgtagggaaagcccaagaatgaccttgctgaggcctggattgggaggcacagtggccacatttggaggaagttcacatttcctggcatgcagacccaaaactgggttctggctctgcctgctgggatctgttatctctggtgggctggcagtcataattcacaattcagacagcccaggcttcctccacagtggtccaaggagcagtcctcagtgggggcaggtgtgggccctacccctaagctagaatgtggttgtcagaaccctgaaagtattagttctaaaaaaaaaaagatatatactagaagtaattgttttatcaattcattgtataataaacaggagtgagacttcattgtatgacttcagttaaaatactattttgtatgcattctttattcacttaagaagcttgtctgcaataataaagccacgtcatgtcttcttttgggagggagagagtcgatggcaggagggggttttgggtgggccactgaaaaggggtaccgaataggttgtgtgatgaaattctgtgtcttggaactggaattgagtttcgatgttgatgaactgattcaaccaggtgttgaaggcacgacagccactgctctacgaaaaggcagagtacgtttttcccttctggttgtaacctggttgagagcttcccctttatcagattggcagctaaacagttgtattagataatccttaaatctgacatccagcctgttacgctctagggctcgctgcttggcctgcgtttgctttttattgtgtatccgttcccctcctacggtgtgctcctgaatgaaggtttctatgtaagcagatgatgattttacctgtcaataccagcactgtattactaacatgcaaaatactgcagatttattttgaaaattaaagttaactggtcacaaatgtaaaaaaaaaaaaaaaaaaa

SEQ ID NO: 345 - DNA, 6299 bp, Homo Sapiens
agagcgtgcgttcggtggcccataggggaagatggcggctgctcctttggaggagcgggattgagaggatcggggtggggagaccaaacaagagagacatttctggctctgaaggcgaacgcttcgctggccatttaggagctctgctcaaagccagacgtatcctagaaggaaaacatcaccatggctacagaaattggttctcctcctcgttttttccatatgccaaggttccagcaccaggcacctcgacagctgttttataagcgacctgattttgcacaacagcaagcaatgcaacagcttacttttgatggaaaacgaatgagaaaagctgtgaaccgaaaaaccatagactacaatccatctgtaattaagtatttggagaacagaatatggcaaagagaccagagagatatgcgggcaattcagcctgatgcaggttattacaatgatctggtcccacctataggaatgttgaataatcctatgaatgcagtaacaacaaaatttgttcggacatcaacaaataaagtaaagtgtcctgtatttgttgttaggtggactccagaaggaagacgcttggtcactggagcttctagtggggagtttaccctgtggaatggactcactttcaattttgaaacaatattacaggctcacgacagcccagtgagggccatgacgtggtcacataatgacatgtggatgttgacagcagaccacggaggatatgtgaaatattggcagtcgaacatgaacaacgtcaagatgttccaggcacataaggaggcgattagagaggccagtttctcacccacggataataaatttgctacatgctctgatgacggcactgttagaatctgggactttcttcgttgccatgaggaaagaattctccgagggcatggtgctgatgtgaaatgtgtagactggcatccaaccaaagggttagttgtttcaggaagtaaagatagtcaacagccaatcaagttctgggatcccaagactgggcagagtcttgcaacacttcatgcccataaaaacacagtaatggaagtgaaattaaacctcaatggcaattggctactcacagcatcacgtgatcatctctgtaaactttttgatatcagaaacctaaaagaagagcttcaagtcttccgaggtcataagaaagaagccacagctgtggcctggcatcctgttcatgaaggactttttgccagtggagggtctgatggttctttgttattctggcatgttggggtagagaaggaagtgggtgggatggagatggctcacgaagggatgatctggagtctggcttggcatcctcttgggcatattctctgctcaggctcaaatgaccatactagcaaattctggactcgaaaccgaccaggtgataaaatgcgagatcgatataatctaaaccttttacctggaatgtctgaagatggagtagaatatgatgacctcgaacctaatagcctggcagtaattccaggaatgggaataccagaacaactaaaattagctatggaacaagaacagatggggaaagatgaatcaaatgaaattgaaatgacaattccaggtttagattggggaatggaggaagtgatgcaaaaggatcagaaaaaagtacctcagaagaaagttccttatgcaaaacccattcctgctcagttccagcaggcttggatgcaaaataaagttccaattcctgctccaaatgaggtgctgaatgacagaaaagaagacattaaattggaagagaagaaaaaaacacaagcagaaattgagcaagaaatggctacattacaatatactaacccacaacttctggagcaacttaaaattgaaagacttgcacagaaacaagttgagcaaattcagcctcctccctcatctggcacccctctcctcggaccccagccttttccaggacaaggtccaatgtctcagattcctcaaggttttcaacagccccatccatctcagcagatgccaatgaacatggctcaaatggggcctccaggtccacagggacagtttaggcctcctggaccccagggacaaatgggaccacaaggtcctccactgcatcagggaggtggggggccacaaggattcatgggaccacaggggccccagggcccgccccaggggttgccacggcctcaggacatgcatgggccccaaggaatgcagaggcatcctggacctcatggccctttgggacctcaagggccacctggaccacaaggtagttctggtcctcaaggtcatatgggtcctcagggtccacctggcccacagggtcacataggcccccaaggcccgcctggccctcagggtcacttgggcccacaggggcctccgggtactcaaggtatgcagggaccacctggtcccagaggaatgcaagggcctcctcatcctcatgggatccaaggcggaccagggtctcaagggatccaaggtcctgtgtctcagggacctctgatgggattgaatccaagaggaatgcaggggcctccaggcccccgggagaaccagggtcctgctccccaagggatgattatgggccacccgcctcaagagatgagaggacctcaccctccaggtggactactgggacacggccctcaggaaatgagaggtcctcaggagatccgaggcatgcaggggcctccaccccaaggatcaatgctgggacctccccaggaattgcgagggcctccaggctcacaaagtcagcaggggccgccccagggctctttaggacctccaccccagggtggcatgcaaggaccccccggacctcagggacagcagaacccagcaagagggccacatccatctcaagggccaataccattccagcaacagaaaacgcctctgctaggtgatgggccccgggcccccttcaaccaggaaggacagagcacaggccccccacccctgataccaggcctagggcagcagggagcacaaggtcgcattccccctctgaaccccggacaaggacctggccccaacaaaggtgactcccgcggccctccaaaccatcacatgggcccgatgtcagagaggcggcatgagcagagcggcgggcctgagcatgggcccgagagggggcctttccggggtggccaggactgcaggggtccccctgataggcgtggccctcacccagacttccccgatgacttcagcagaccagatgacttccaccctgacaagcgctttggccaccggttacgtgaatttgaggggcgaggaggacctttaccgcaagaagagaagtggaggcgagggggccctgggcctccgtttccccctgatcacagggaattcagcgagggggatggccggggtgcagcccgaggccctccgggggcatgggaaggccgcaggcccggagatgaacgtttcccccgggatcccgaggacccacgttttcgagggcgcagagaagaaagtttcagaagaggagccccgccgaggcatgagggccgtgctccccccagaggaagggatggttttcctggtcctgaagactttggtccagaggagaattttgatgcttctgaggaagcggcccgaggacgagatctcagaggtcgaggtcggggtaccccacgaggaggaaggaagggtttacttcccactcctgacgagttccctcgctttgaaggagggcggaagccagattcctgggatggaaacagagagcctgggccaggtcatgaacattttcgtgatactccccgccctgatcatccccctcacgacggtcattccccagccagcagagaacgctcctcttctctccaaggcatggacatggcatccctacctccccgaaagcgcccctggcatgatggcccaggcacttctgagcacagagagatggaggccccaggaggcccttctgaagaccgaggaggcaaaggccgagggggcccaggacctgctcagagagtgcccaaatctgggcgttccagctccttagacggagagcaccacgatggataccacagagatgaaccttttgggggccctccaggcagtggcaccccttctcgagggggccggagtggcagtaactggggtagagggagtaacatgaactctggcccgccgaggcgaggagcttcacggggtggtggaaggggtcggtagaagctggaactgagtaccctgaggcctctctggacagtatgtaagaacttcttgtggactcaccaagagaaacaaaaggaagcctgcaccattgtagccctgaactcttttctgggcacctgaatcccaggaaccctcaatgaggtcttcaagatgaagagactgctgccagctaccagcctggctggccctgtcctgtccaccctcattgccccaactcccatgttgttttgtgaagataaaagctgggatctttttcttttttttaagtctcacaagacatggggcatctccacaaatttaagttcctgtccatttggaaatttgtttctatgtgtacagtttgtcagagaaaaacaaagtttttgtatgaatacagaatgtgatttacgcaagaattgacagaaaactagttgtgaagtgcttgccttaaggaaacctttggtttccatcgcatcccatctgccaaggaatgcacggttgttgctgatgttcatgagcatattaaccactaggttatctaaattaatctcagctgtgaactttgtgtttttcaacacattctgtcacaccatttttgtgacagaaaaatacttgaaaattattctaatgtagtttgtagtaggttcaaatttttattcagacatgctctgacagatggaaaattgtactctgaagagaaaatgcaatcttctggatgtccaacgagggagcttccccttggaagcatctcctaagaatcacagtttaggtttgaatcgccttgttatgatgaggagaggaacttgatgttagtcagaaataaagtcacatgccctttagataacttgaaatcacacatggagttgataaggaatggaccaaaataggtcctcaaacaattttgcaacacttaattaagttttcctctcttcctcttccatactatgtggaaataccagtgttacggcagggcgtacttctaactcacagtaagccagatagatcttgtccatggcaaattccttgtttaaaataaacataccatttagcccagtttggattggaagccaaaaattcagtttgttatataccccatgatactttctatactgacctttattttggttttacatggaagcttttattaaaaggactgtcctatggccaccttaacatttcattacattggcagcttcagttttggcatcagtcaaatttatttggcaaatttagtggtgctggaagtttctttttttcttttccttttttgacagagtcttgctctgtcacccagccaggagtgcagtggtgcaatcacggctcacttcagctttgaccctgcctcagcctccctagtagctaggactacaggcatatgccaccatgcccagctaattttttgtgtgtgtgttttttgtagagatggagtttcaccactttgtctatgctggtttcaaactcctgggctcaagcggtccacctgctgtggcctcccaaagtgctgggattgcagatctgagccacagtacctggccgctggtgctggaagtttcaatggttgcttagaaaaggcatactgatatagtttaacaggatatgaaaatttaactggttctctatgaatgtaaaaaacagcaaaagctaattgatttctgtggagtgagaaaatgtcagccatatacactgcttttcagtgttagaatctagagactattttttttttaactttgaaattacagcttatttaatcagcgctccaccataaacatgctattaggaggctcaagattgctttaggttatgggtatttcttcactcacccccaactggtatagcttaaagagagagaaactgtaatcaaatttcatgaagctaaaaccggatccagagaccaaacccatatcaagattagactttttttccctgagattctagtggaaaaattttcattattttgggctttaactttagaaacatagtatctcagtaagcagataaccagatcacatttaaaaattttcattttaccttgaagctctactggacttgacagatcacattttgagagtgaattcatttaaacaataaacctctacattatacttataaaaaaaaaaaaaaaa

SEQ ID NO: 346 - DNA, 2667 bp, Homo Sapiens
gaattattttgcaggagtctacacccaggcggtggctatacttattaaagttggcgggagctgagcgatcagtcggtcctgggctggctgtggtgtagggcgttgcaggcagcgctcacctcctcaggccggcagaatgcgggtggctgtggctggctgctgccacggcgagctggataagatctatgagacgctggcgctggcagagcggcgcggcccggggcctgtcgacctcttgctgtgctgcggcgacttccaggcggtgcgcaacgaggcggatctacgctgcatggccgtgccgcccaagtatcgtcacatgcaaaccttctacaggtattactctggagagaaaaaggctccagttctcacgctcttcattgggggaaaccatgaagcctcaaatcatttgcaagagttaccctatggtggctgggtggcaccaaacatttattatttaggtttggctggtgtggtaaaataccgaggtgtaaggatcggtggaatctctggtatctttaaatctcatgactatcgaaaaggtcattttgagtgccccccttataattcatctacaatcaggagtatatatcatgtgagaaatattgaagtctataaattaaaacagctgaagcagcctatagatatattcttgtctcatgattggccaagaagtatatatcattatggaaataagaagcaacttcttaagactaaatcttttttccgacaagaagtggaaaataacacattaggaagtccagctgcctcagagcttttagagcatctcaaacctacttattggttttctgcccaccttcatgtgaagtttgccgccttgatgcagcatcaggcaaaggataaaggacagacagccagagcaaccaaatttttagccttggacaaatgcttaccacatagagattttcttcagatattagagatagaacatgaccccagtgctcctgattacttggaatatgatattgaatggctcactattctcagggctacggatgatcttattaatgtgactgggcgcctgtggaatatgccagaaaataatggcctgcatgcaaggtgggattatagtgcaacagaagaaggtatgaaagaagtattggaaaaattgaatcatgatctcaaggttccatgtaactttagtgtaacagctgcttgttatgatcctagcaagccacagacacaaatgcagctgattcataggatcaatcctcagactactgaattttgtgcccaacttggcatcatagacatcaatgttaggcttcagaagtccaaggaagaacatcatgtgtgtggtgaatatgaagaacaggatgatgtggagagtaatgactctggagaagaccagagtgaatataatacagacacatctgctctgtcttctattaatccagatgaaataatgttagatgaagaagaagatgaagatagtattgtaagtgcacatagtggcatgaatacaccatcggtagaaccttctgatcaagcttctgagttttctgcaagtttctctgatgtcaggatcttgccaggctctatgattgtatcttctgatgatacggtggattccacaattgatagagaggggaaacctggtgggactgtggagtcagggaatggagaggacttaaccaaggtgccattgaagaggctgagtgatgaacatgaacctgaacaaagaaagaaaattaagaggaggaatcaagccatttacgctgcagtggatgatgatgatgatgatgcagcttaagatgatttacttgttttgtttttgtgtttgttttgcttttttgagatggagtttcactcttgtcacctagactggagtgcaatggcgtgatctcggctcaccgcaacctccgcctcccaggttcaagcaattctcctgcctcagcctcccaagtaggtgggactacaggtgcccgccaccacacccggctaatttttgcatttttagtaatgacagggtttcaccatgttggccaggctggtctccaactcctgacctcaggcgatccacctgtcttggccttctaaagtgctgggattacaggcgtgagccactgtgcctggccgacaatttacttgtcttagtattatatgtagatatgtgattttttgagactgtatttttagagctgaatttttgactaaagacttaactttataataatgaagatacattagagaattttagttagatattgactttatctttaggcttttgtatgtttcagatgcaaacatattaaagtttcatatatttacttgactgggtatctttttttttgaagacatacattattcacttccatttttacaataaacacttacttaacatctactctgtgccaagcactctgctataatatgggaccataaagatgagtaagacaaggatttttgcctccaaggacttgttatcactgtaaacattttgatgtatacaatatggctatattatattttgttttataaaatcaagtctttgtatatattatgatgtatgctttcttttcatttattataaatatttttcctgatcagcttttaatatctgtcaaataaaaattgaaattgaagatggtatataagatttcaggaaataaactactctgaatactaaacaaaaaaaaaaaaaaaaaa

SEQ ID NO: 347 - DNA, 1901 bp, Homo Sapiens
ggtttccagaatccttagcgcgaggcggaaaaaatatttctcccagcttgtgttgatgccgcgattttgactgagacttcttcccacgatttctgtttttgcttctccaaggaaaatggcagctcccgagcagccgcttgcgatatcaaggggatgcacgagctcctcctcgctttccccgcctcggggcgaccgaacccttctggtcaggcacctgccggctgagcttactgctgaggagaaagaggacttgctgaagtacttcggggctcagtctgtgcgggtcctgtcagataaggggcgactgaaacatacagcttttgccacattccctaatgaaaaagcagctataaaggcattgacaagactccatcaactgaaacttttaggtcatactttagtcgttgaatttgcaaaagagcaagatcgagttcactccccatgtcccacttcaggctctgaaaaaaaaaaaaggtctgatgaccctgtcgaagatgataaagaaaaaaaagaacttggttatttaacagtagaaaatggaattgcaccaaaccatgggctgacttttcctttaaattcatgcctcaagtatatgtacccaccaccttccagcacaatcctagcaaacattgtaaatgccttggcaagcgtgcctaagttctatgtacaggtccttcatcttatgaataaaatgaatttgcccacaccttttggaccaattactgcgcgacctcccatgtatgaagactatatgccattgcatgcacctcttccacccacatctcctcagccacctgaggaacctcctttgccagacgaggatgaggaattatctagtgaagaatcagaatatgaaagcactgatgatgaggaccgacagagaatgaacaaattaatggaactagcaaatcttcagcccaaaagacctaaaacaataaagcagcgccatgtgagaaaaaagagaaaaataaaggatatgttgaatacacctttgtgtccttcacacagcagtttacatccagtgctgttaccttcagatgtatttgaccaaccacaacctgtaggtaacaaaagaattgaattccatatatctaccgacatgccagctgcatttaagaaagatttagaaaaggaacaaaattgtgaggaaaaaaatcatgatttacctgctactgaagttgatgcatccaatataggatttggaaaaatcttccccaaacctaatttggacatcacagaggagattaaagaagactctgatgaaatgccttcagaatgtatttctagaagggaattggaaaagggcagaatttctagagaagaaatggaaacactttcagttttcagaagttatgaaccgggtgaaccaaactgtagaatttatgtaaagaatttagctaaacatgttcaagaaaaggaccttaaatatatttttggaagatatgttgacttttcatcagaaacacagcggatcatgtttgatatacgtttgatgaaagaaggtcgtatgaaaggacaagctttcattggacttcctaatgaaaaagcagcagcaaaagccttaaaggaagctaatggatatgtgctttttggaaaacccatggtggttcagtttgctcgatctgctagaccaaaacaagatcctaaggaaggaaaaagaaagtgttaaaaattaataaaggtttttttgaatcccgtgtccttcaagtgctttctaactttgagaggaagaaattgaccacctggactatggaactgtgcgtaacagctttgaaagtgtatttaaaaattaaatctatatgcctttaaatcagtgaattggaaacatattacatgtattttaatgattttcctcaaatataataaattgtttcctttccaataaaaaaaaaaaaaaaaaa

SEQ ID NO: 348 - DNA, 2422 bp, Homo Sapiens
ggtggcttccaaggcgactccgtagtggatgcagcgccggacgccacagccgaaaaacagaatcttggaactggtttagtacaatccaggtcgagttccttgttttttatccgagtggccggcaggcccatgtgctgtcttgtttttaacacatcagctcttgccggaagccgctaagagataaaataggaagtcccacccttcccttagagaaggaaaacggagagccgaaggagtcaatctaaattcgatgagcgcgtcgggctccaaggcaggcgctgtcagcccgggagggctgtctgggatttctagagggtcccagaacgggttcttcccaggccgatcccgcctgcttcctgccccgtctctccacccgcctcccgccctctgtaagggaccccgagggcggcgccggaaacacggagaaggcccagaacggcgcgggacccgagaggcctacgttggcaaacgcagcccgctgcccctttgctcgcttcccccgggcctggagtggctcctgtcgcttctggcgctccgatttcgagaaatgactttcagctgtgcaaggcgagaatgctactttagataatgagaaaaaatctctcgaatggctcccaaaatgaggtccttgtttaagaggccacaggaagccgccagccgaacgctgataccaaagaggaggccaagaagcggactgtggcttggtgacctgtttggtattgccaaattttcagcttttattaaagctgaaacaccttggctgtttaaaacgttcgacaaggacttttttatgaacgttaacggcacagcatacgggttttttggaaaaaaaaaaaaaggcaggacttcagcccgtccgcccccttgtgcaggtccattcatgaacctcgagttagaggcctttcttctgaaactcagaatctagtagggaagacctgtgtagacgaataaaaataaatacatcacagcttgttaagtgctgtgacaaagaggcagtgaaatcctgcttgaggtcatctgccttgctaaagaggtttgactatgttgtaggcacagggttagggttagactctgtaatgggaagttatgtgatcagatttctgtttaggaagatcactggccaggcggggtggcttacgcctgtaatcccaatactttgggaggccgagtcggtggattgcttgaggctaggattttgagaccagcctggggaaaccgcgtctctactaaaaatttgaaattagccaggcatggtggtgcgaggctgtaattccagctacttggaggctgaggcgggagaatagcttgaacccagtggcggaggctgcagtgagccgagattgcgccactgcactccagcctgggcgacagagcgagattccatctcaaaaaaatcattccaacgagtggataaagaaaatgtgatatatatgcactatggaatactaagccataagaaggaatgaaataatggcatttgcagcaacctagatggagttggagaccattattctaagtgaagtaactcaagaatggaaaaccaaatattgtatgttctcactcgtaagtgggagctaagctgcgaagatgcaaaggcataagaatgatatagtggactttgaggactcaagggttgaaggatgagactacacattgggtacagtgtgcactgcttgggtgatgagtgcaccaaaatctcagaactcaccactgaagaacttccccatgtaaccaaaaaccacctgttccacagaaactatcgaaataacacttttaaaactttactatttctgaataaaatttacatgcatttctcagaaaaaaaaatatttggaattgaggtatctaatagagaactgagttaaattattgccacttaaaaacacaaagtgatatagccactttgtgaattaatcagtcagcagtggctaggttatgcttagtggtttataaccaaatcttagtttataacaacaaatgtgtattgttaattcccactacaagtttataacgacattgctggatgctacactccatgtctctttgtgggacccaggctcatgggacttctgttatctgcattagagagagagaagacaacaaaatatgcactggttcttgaagctttggcccagaagtaaaatatgtcttttacctgttcacattgcattgggccagggcaattatcatggctgcaagtaacttcaaaaggatggggaagtgcgatcttggcatgtgtcagaagaaatgaaaacatttggtgaagagcattaatgactgtctttacaggaaaaaagcaatcaaatagacatgatttcttgtttcagtttcatcatttcctactgtgttacctaaactttctgagccccagtttcttattactaaaataaaataatgataaagatgaaaaaaaaaaaaaaaa

SEQ ID NO: 349 - DNA, 2683 bp, Homo Sapiens
cagtcggctcggaattggacttgggaggcgcggtgaggagtcaggcttaaaacttgttggaggggagtaaccagcctgctcctctcgctctcctcctcgtctgcgccgcgtttcagagagaaaattcctgttccaagagaaaataaggcaacatcaatgaaggagagaagagccagccagaaattatccagcaaatctatcatggatcctaatcagaacgtgaaatgcaagatagttgtggtgggagacagtcagtgtggaaaaactgcgctgctccatgtcttcgccaaggactgcttccccgagaattacgttcctacagtgtttgagaattacacggccagttttgaaatcgacacacaaagaatagagttgagcctgtgggacacttcgggttctccttactatgacaatgtccgccccctctcttaccctgattcggatgctgtgctgatttgctttgacatcagtagaccagagaccctggacagtgtcctcaaaaagtggaaaggtgaaatccaggaattttgtccaaataccaaaatgctcttggtcggctgcaagtctgatctgcggacagatgttagtacattagtagagctctccaatcacaggcagacgccagtgtcctatgaccagggggcaaatatggccaaacagattggagcagctacttatatcgaatgctcagctttacagtcggaaaatagcgtcagagacatttttcacgttgccaccttggcatgtgtaaataagacaaataaaaacgttaagcggaacaaatcacagagagccacaaagcggatttcacacatgcctagcagaccagaactctcggcagttgctacggacttacgaaaggacaaagcgaagagctgcactgtgatgtgaatctttcattatctttaatgaagacaaaggaatctagtgtaaaaaacaacagcaaacaaaaaggtgaagtctaaatgaagtgcacagccaaagtcatgtataccagaggcttaggaggcgtttgagaggatactcatctttttggaatcctgaccttaggttcggcatgtagaccaagtgatgagaagtgaatacatggaagagtttttaagtgtgacttgaaaaatatgccaaaaaatgagagatacaaatgagctagaggaagatgaggggggatgcgagtacctccaagaagaaaaatcacactctgaatggtgcttgcatttttgggttttttttttttgttataatctattcatggatctccactttgatttaatttttaaatgttttaatctcctttacaaaaagtatacgttaatataccgtcctcaagggggaactggcactgtgaccttagcatttagttttctagaggatgtgatctaatttctttctagctcatcattaaaaaggaaattgtatcaggacccatgggatatatccagaggcaaactttatgaggctttgaaatcttgccttcctgaagatagctgagtaggatggttctaaggaaagcctttgcaatcttgcaagatttgtagaccagcactacaaagatcgcatagatcaaataggaaaaaaaatgtcgatttttattcagtctgatggttctgttcttcattgtgattgtcattaaaaagtggtaaattgctcaatgtaatatttttgtgcgctgtttagaagttgtgtgattttttgccatcgttgataaaaatgcaaagtcaaataaaaggtgtcttggtttgatgtcatagaatgatccaaggagagaaaaaaggtagttactgttttcaccagaaaaggtaatgagtgaaggaaagaatagtagcagaaagcacagtttgtgagtaaagctgtctggaattaagttaccaaaaatacaaagcaaaaggactattattttgggttgaagctccaaaactgacagcatctgataatctgttggtttatttcacttttcattaaatgaacattgatgagagaagatgccacttacccaagctttagagaatccctagtggaagattatatgataaactttcagtcctgacataacactagggcatttctagagtgtcattgctaaaacctcactgaacagatgcagccaaggtctgtgttcagcacttggtctctgttgttacgtaaaataataagcatttaaaatagtttacagatatttttgaccagttccttttagagattctttcagagaagaaaccagatctgacctgtttattgttggcgcttgttgaaaacgagctttctttcccatgatagtgcttcgtttttgaagtgttgaagctgtgctccccttaaatcgtggcaggagagattaaggtaattacaacactcagttctatgtcttacaagcactttgtcttgtctctgcaagaaaattcgattccagtcatttcccataaaatacagacattttaccaacataatatgctttgattgatgcagcattatgctttgggcagtattacaaaatagctggcgagtgctttctgtatttaaatattgtaaaaagaaaataagttataactgttataaagcagaacttttgttgcattttttaaactgttgaagtcactgtgtatgtttgtttggtcaatgtttccgcagtatttattaaaacatactttttttttcttcaaataaaaaagtaaccatgtctttgtctaaa

SEQ ID NO: 350 - DNA, 1834 bp, Homo Sapiens
ggcgacggaggcggaagtgcggtgttttagccggtggctgctgtctctgggcgggccgtgggaggctcccgaggtgggggccggggcgggatggctgcagcggcggccggggccgggagcgggccctgggcggcccaggagaagcagttcccgccggcgctgctgagtttcttcatctacaacccgcgcttcgggccgcgcgaaggacaggaggaaaataagattttattttatcatccaaatgaggtagaaaagaatgagaagattagaaatgtcggattgtgtgaagctattgtacagtttacaaggacatttagcccatcaaaacctgcaaaatctttacatacacagaagaacagacagttcttcaatgaaccagaagaaaatttctggatggtcatggttgttcggaatcctataattgaaaaacagagtaaagatggaaaaccagttattgaatatcaagaggaggagttgttggacaaggtttatagctcggtgctgcggcagtgctacagcatgtacaagctttttaatggtacatttctgaaagccatggaagacggaggcgtcaagcttctgaaagaaagattagagaaattcttccatcggtatttgcaaacgctacatttgcagtcatgtgacctacttgacatttttggtggaatcagcttcttcccgttggataaaatgacttatttgaaaatccagtcctttattaatagaatggaggaaagcctgaatatagtcaaatacactgcttttctctataacgatcagctcatctggagtggattagaacaagatgacatgagaattttatacaaataccttaccacctccctttttccaaggcacatcgaacctgagttagcaggaagggattctccaataagagcagaaatgccaggaaatcttcaacactatggaagatttcttaccggacccttgaacctcaatgatccagatgcaaaatgcagattccccaaaatttttgtaaatacagatgacacttatgaagagctccatttaatcgtttataaggccatgagtgcggctgtgtgctttatgatcgacgcctctgtccacccaacgttggatttttgccgaagactggacagcatcgttgggccccagctcacagtgctggcctctgacatctgtgaacagtttaacatcaacaagaggatgtccgggtctgagaaagaaccccagtttaagtttatctacttcaaccacatgaatctcgccgagaagagcacagttcacatgaggaaaacgcccagcgtgtcgctcacttccgtgcacccggatttaatgaagattctcggtgacatcaacagtgactttaccagagtggatgaagatgaggagatcattgtgaaggccatgagtgattactgggttgttggaaagaagtctgatcggcgggagctctatgttattttgaatcaaaaaaatgcaaacctgattgaagtaaatgaagaggtcaagaaactttgtgcaacgcagttcaacaacatcttcttcttggattgacggatgacggctcaccgagagcatatctaaaaaacactctgcaaacatttggtcacatgcaagttagtggtcatatgacggactgcattcaggacaagggtaaagcaatacttgctttgaagaatcacatttcgactcggtctgctgatctgaggtttttagattttaaatatttatgtggaattaattaaaggtagttggctatatcgctatcatttcattcttttgacattatgtgaatattttactggaaaataagactaataaattgttaaaagtttttaaaaaaaaaaaa

SEQ ID NO: 351 - DNA, 5149 bp, Homo Sapiens
gacagatgaggaccagtaaacacaatagaaagtttatttaatgtggagtatgctgctgctgttccgctttgcgtcctcgctacaaacgcctggtggacaacatattccctgaagatccaaaagatggccttgtgaaaactgatatggagaaattgacattttatgcagtatctgctccagagaaactggatcgaattggttcttacctggcagaaaggttgagcagggatgttgtcagacatcgttctgggtatgttttgattgctatggaggcactggaccaacttctcatggcttgccattctcaaagcattaagccatttgtagaaagctttcttcatatggtggcaaagctgctggaatcgggggaaccaaagcttcaagttcttggaacaaattcttttgtcaaatttgcaaatattgaagaagacacaccatcctatcacagacgttatgacttttttgtgtctcgattcagtgccatgtgccattcctgtcatagtgatccagaaatacgaacagagatacgaattgctggaattagaggtattcaaggtgtggttcgcaaaacagtcaacgatgaacttcgggccaccatttgggaacctcagcatatggataagattgttccatccctcctgtttaacatgcaaaagatagaagaagttgacagtcgcataggccctccttcttctccttctgcaactgacaaagaagagaatcctgctgtgctggctgaaaactgtttcagagaactgctgggtcgagcaacttttgggaatatgaataatgctgttagaccagtttttgcgcatttagatcatcacaaactgtgggatcccaatgaatttgcagttcactgctttaaaattataatgtattccattcaggctcagtattctcaccatgtgatccaggagattctaggacaccttgatgctcgtaaaaaagatgctccccgggttcgagcaggtattattcaggttctgttagaggctgttgccattgctgctaaaggttccataggtccgacagtgctggaagtcttcaatacccttttgaaacatctgcgtctcagcgttgaattcgaagcaaatgatttacaggggggatctgtaggcagtgtcgacttaaatacaagttccaaagacaatgatgagaagattgtgcagaatgctatcatccaaacaataggattttttggaagtaacctaccagattatcagaggtcagaaatcatgatgttcattatggggaaagtacctgtctttggaacatctacccatactttggatatcagtcaactaggggatttgggaaccaggagaattcagataatgttgctgagatctttgcttatggtgacctctggatataaagcgaagacgattgttactgcactgccagggtctttcctggatcctttgttatcaccatctctcatggaggactacgaactgagacagttggtcttggaagtaatgcataatctcatggatcgtcatgacaatagggcaaagcttcgagggatcagaataataccggatgtagctgacctaaagataaaaagagaaaaaatttgcagacaagacacaagtttcatgaaaaagaatgggcaacagctgtatcggcacatatatttgggttgtaaagaggaagacaacgttcagaaaaactatgaactactttatacttctcttgctcttataactattgaactggctaatgaagaagtagttattgatctcattcgactggccattgctttacaggacagtgcaattatcaatgaggataatttgccaatgttccatcgttgtggaatcatggcactggttgcagcatacctcaactttgtaagtcagatgatagctgtccctgcattttgccagcatgttagcaaggttattgaaattcgaactatggaagccccttattttctaccagagcatatcttcagagataagtgcatgcttccaaaatctttagagaagcatgaaaaagatttgtactttctgaccaacaagattgcagagtcgctaggtggaagtggatatagtgttgagagattgtcagttccgtatgtaccacaagtaacagatgaagatcgactttctagaagaaaaagcattgtggacaccgtatccattcaggtggatattttatccaacaatgttccttctgatgatgtggttagtaacactgaagaaatcacttttgaagcattgaagaaagcaattgataccagtggaatggaagaacaggaaaaggaaaagaggcgtcttgtgatagagaaatttcagaaagcaccttttgaagaaatagcagcacagtgtgaatccaaagcaaatttgcttcatgatagacttgcccaaatattggaactcaccatacgtcctcctcccagtccatcaggaacactgaccattacttctgggcatgcccaataccaatctgtcccagtctatgagatgaagtttccagatctgtgtgtgtactgatcggcgcatgaagacctcagcatatgatttgtaaagcctaaaaattaaggccaagctgagctttcagggtttacttaatgtgtattaacatacttcttgaaaataatgatggaacatatctttaaccaaatgtttggcataccatattagaagttttggagctatatataatttcgagtactttcaaagatagatttatgccatgttaatttgctttgaggttcctgttgcctttttaagttgaacatgttttggtttcactttattccactgttaagtagtatgttttaaacttttcacaaatgtaatgttttttaaaaagtaagccttcagaggattgaaactgtataaattgtttatctcttaaacatctacacagccgcttagatgtagaatttttgttgttgttttctgcaaaggcagatacatttaaatatattcctagtcctggggctgcaaaactgttcggtggctttttgtccccatgctttagataagctgggataggcaccttgctattcagttactataataatatgtgataggcattcctcatcttcttcacaataataggacatctgttgaatagcattcctcgaatataaccctaaaaacgccatactttaaattgtctggttcttgtaatattgtgtttcctgccaagagtttgaccattctgcttgagaagtgtagagcttactcttggagtaccaaactgtgcaatatttttacatcataagatgtattagtttacaggctgtgctttgaaattatagtagtattttgctgtggctccattaattaaatgagatatatatttagtgcagaaaaaagacatttaaaacagctattagttcacctgtgaagagtctgtacattttgatttctattaagagcacatttatttacatttgtatattattttaaatcctcatagtcaaaaaattctccagatggacttttaatttgtaagatttgaactgtgacttgtatacatctgtttagaatcaattatatttgaaaagctgcctgtgttttaacagtcaagtgtgctaaagtttgtcaatttaagctgcttttgatttcagctaccaagatcacaggtgcactctacacataacactgacagacccataacattacatacatcttagtgaattctatcacatggtaaaatgaacagctttctttgtaactcataaaattctcttaggacatttttataaagtcacctgtttatagttctatcttttcagattccatttctttttacataaaacagcatacatatcaaaaactgtagcctagaatacagtttaatttttggcttttgtttttgtttaaaaaattgcagtgaagaatgggatgtttgtgtttatggctatttgggcacctttagtagaaacagacaaaagtaaggaaacgataataggacaagcatacttgaaaatttctgaatacttaaacaaaagcgcaacatcttgaaaaccagtctagtcattgaaacctatgaaatgacactgaaagatcctgggctgcttcttaaataagtagatcagcaagacttgtttcagagtgacagtggagtcgttaccgctggaggactaaagggccctgtggcagctgtcactggaactttgcctcttgatcaggaaaaatgcttcaccagtccgtaaagccaagttgtattttttttattgcccttttttccttctgtatttttaaagaaggatgttaatttttgactatatattttaaaaaaatctaagcagggggacatgcaaaaacaatcatcatccacttggatgtcattttatagattaacactgtgtgcttttgtatggaaaaaatatatataatttaatagtataaaaaataaaatatatattcatttgcacttacgtgaaacacaaactttgctctacaaaatttcgtgtttcttagtgattttaaaatgcatgtattgcatgtaaaggaaaaccattacaattaatgtttatcacacctttatcttggtctttgttgatttgggttttgttggggtttttgttactgtttttaaattacagtaggcttctatatatcctggatttctgaactggtcttgttgacaaggattcccaagaaatggatcttttcactggctgactctcccatatctgcaagagattctgcaggaactgggtgtgcacacggtgttgtagccagttcaggtactgaatatttaggatttggtgaagttcactgtattgctatatttttgtagataaataaaactcaataaattgttaatcattctctttttgctgtatagaattgcttatatcactctttctttcatgacattggttaacatttaaatgttcctcctgtacttgtgttgtctgtgaccgcttatagagttttattgttattggtgtttacctgaatacctatgcgtacacacacacatatttccttaatacttctgaactcattatcttttagaataataatactactacactttaccagcaattaacttctccctacccaaaatgtttttcttcctgtctgaaaatggaactaatttgtcttattcgtgcttatatctgtattaaatgcaataaagttagtttttgaaatgtaaaaaaaaaaaaaaaaaaaaa

SEQ ID NO: 352 - DNA, 5302 bp, Homo Sapiens
tgtttgcggttgctgtgatggcgatgtgagggggcccggggcgggatggtgctgacccgggtcgggccgtcttcttgcagctggacaacgagctcctccgttcgacaggcgggggaagaggccgagccgggcgagagggggaacggtgtatttttaacaacgggaatcagtaactggaagtacaagattggttatttaataatgttaaaaatgaggctttgaaaagcagaggtgctgttatcagaatagtcttctgggtataaattaaaaatgactgaagttcaagcaatggtagaattctctgtggagctaaacaagttctacaatgtggatttgtttcagagaggtaaaacatttcaaattttgtacaaaaatgaagaggttgttttaaatgatgttatgatcttcaaagtaaaaatgctattggatgaaaggaagattgaagaaacccttgaggaaatgaattttctattatccttggatctacacttcacagatggagattattcggcagatgatctgaatgccttgcaactaataagtagccgaacattgaagctgcactttagcccccatagaggccttcatcatcatgttaatgttatgtttgattacttccacctttctgttgtgtccgttacagttcatgcatcattggttgcactacaccagccactaataagctttcctcgccctgtgaagacaacttggttaaatagaaatgcaccagcacaaaacaaagattccgtgattcctactcttgaaagtgtggtctttggtattaactacacaaaacagttatcaccagatggttgtagcttcatcattgcagactccttcctacatcatgcgtatcgttttcattatacactttgtgccactttgctgctagccttcaagggattgcacagctacttcattacagtaacagaagagattccttcttgtcagaaactagaactggccaaggccaacatgcagctcctatatgagcgtcttctcagaagaaaacagctacgaacacagaaagacaaccatctagaggaaatggatgtagaagctcgacttactgaactatgtgaagaagttaagaaaatagagaatcctgatgaactggcagaacttataaatatgaatcttgcgcaactttgctcacttttgatggctttatggggacagtttctggaagttataacgctacacgaagaactaagaatattattagcacaagagcaccatactttgagggtacgcagattttctgaggcattcttttgttttgagcatccaagagaagctgccattgcataccaggaacttcatgctcagagtcatctacagatgtgcaccgctatcaaaaatacttccttctgcagttctcttccacccttacctattgaatgtagtgaattagatggagatctcaattcattacctataatctttgaagataggtatttagattcagttactgaaggtaaacttgatatctcccaggacgatagtgaaattacacaaatggaacacaatctggcatccagaaggtcatcagacgattgccatgatcatcaaacaaccccatctttgggagttagaacaattgaaataaagcccagtaataaagatcctttcagtggagagaatataactgtcaaactaggaccttggacagagcttcgacaagaggaaatacttgtggataatttactacccaactttgagtccttagaatctaatggtaaatctaaatctatagaaataacatttgaaaaggaagctttgcaagaagcaaagtgtctttctattggagaatcattaactaaattacgaagtaatctacctaccccttctacaaaagaatatcatgttgtagtaagtggagatacaattaagttaccagatattagtgccacatatgcctcatctagattttcagattcaggtgttgaaagtgaaccgagttcttttgcgacacatccaaacactgatttagtctttgaaactgtgcaagggcaaggtccttgcaatagtgaaagattatttcctcagcttttgatgaaacctgattataatgtaaaattttcattaggaaatcattgtactgagagtacaagtgctataagtgaaatacagtcatctttgacatccataaactctctaccctccgatgatgaactgtcacctgatgaaaattctaagaaatctgttgtacctgaatgccatctaaatgatagcaaaactgtattaaatctaggaacgactgatttgccaaaatgtgatgatactaaaaagtcaagtatcactttgcaacagcagagtgttgtattttcagggaacttggacaatgaaactgtagcaatacattccttaaattcaagcattaaagaccctttacaatttgttttttcagatgaagagacttccagtgatgtgaaaagtagttgcagctccaaacctaacttggatactatgtgtaaaggcttccagagtcctgataaatctaataactctacagggacagcaattacattaaattcaaaactgatttgtttaggcactccttgtgtcatttcaggttccatttctagtaatacagatgttagtgaagatagaactatgaaaaaaaatagtgatgtattaaatctcacacagatgtattcagaaatccctacagttgaaagtgaaactcatctgggtacaagtgatcctttttcagccagtactgatatagtaaagcaagggcttgtggaaaattattttggttctcaaagcagtacggatatttctgacacatgtgctgttagctacagcaatgcacttagccctcagaaggaaacttctgaaaaagaaattagtaatcttcagcaggaacaggataaagaggatgaggaggaagagcaggatcaacaaatggttcaaaatgggtactatgaagaaacagattattcagctttggatggaacaataaatgctcactatacaagcagagatgaactaatggaagaaagacttacaaaatctgaaaaaataaacagtgactatctgagagatggtataaatatgcctactgtctgtacttctggttgtttgtccttcccgtctgcaccacgagagtctccttgtaatgttaaatattcttccaaaagtaaatttgatgccattacaaagcagccaagcagtacttcttacaacttcacttcttcgatttcctggtatgaaagttcaccaaaacctcaaatacaagccttccttcaggcaaaagaagaactgaagctactaaaacttcctgggttcatgtacagtgaagttcctctgctggcatcctcagtaccttattttagtgtagaagaagaggatggttctgaagatggagtacatctgattgtctgtgtgcacggtttagatggaaacagtgcagatctccgattagtaaaaacttacattgaacttggattgcctgggggaagaattgattttcttatgtctgagagaaatcagaatgatacttttgctgattttgatagcatgactgatcgtcttttggatgagataatacagtatattcagatatatagtctaacagtctcaaaaataagctttattggacattcgttgggcgatttaataattcgttcagtgcttacaaggccaaggtttaaatattacctcaacaaacttcatacctttctgtctctttctggacctcaccttggtacactctacaacagcagtgctcttgttaatacaggtctctggtttatgcagaaatggaaaaaatcaggttcgcttttgcagctgacatgtcgagatcactcagaccctcgccaaacttttttatataagcttagtaacaaagcagggcttcattatttcaaaaatgttgtgctagtgggatccctacaggatcgctatgttccttatcactctgcccgcattgaaatgtgtaaaacagctttaaaggacaaacagtcaggacagatctattcagaaatgatccacaacttgcttcgacctgttctgcaaagcaaggactgtaatttggttcgctataatgtcatcaatgcattgcccaatacagctgattcactcattgggagagctgcacatatagctgttcttgattcggaaatatttttagagaaattctttctggttgctgccctcaaatatttccaatagtataaaaacattgttagcgactggacaactacctcattcaacaatgtttcaaataatgtattatattaaaatgtagatgctgataagttctaagaaatatttatacctttttatatggaagataatttatatcatccatgtttagtgctttttaaacatcaactttactttctaggtaatgtggctgtgcaatatttttttaattttatctttttacttttctattactttttcatatattttgctacctaagtatttcagtgaaactttaagcccatacctgtgtctgattgtttattattggctttccacaattcttacatcagactacattatattagagaccattattgctagaatagcatgggatttaaaattttctaatactgggggtattatttagttaattataaatttttcttttcacattttactgtgttttaactggaaataaaattatggctgctacaatatattttttgaaatcaacttctgtagttctaaaatacaactttatcatacaatcaaaccaggtagttcatataaaacagtgtaatacaagttttctataaagtcattactgttgcttaaacatatttcatgcctattaaaatatattttctactggtgatttcaacattatttctcatactgacttttattactggaaatgttcctgtacatgttggcagcagataaagatttttgaatgtttgaatgccctctgccttgatttggttggaatttttgctaaattggtaatgttgcttgaactttatgactacattttcttttaacttttttcatggacttccttatatgtacataataattaaatgttgaaatttatgaaatacttttatgaatttagataatttttaaatattgttaaaatttattgaactaaaaagtaatgtacataaaataattcatgttaaagatggaacaaaataattaactttacatgtttggtgatacagatgcaaatgtttttgatatatggagatgttgagtcttttgactttactaaaggtgctgaatagcattaaattcactattttccttttctgttttacttgtgaaaataaaaatgcactaaggttaaaaaaaaaaaaaaaaaaaa

SEQ ID NO: 353 - DNA, 5165 bp, Homo Sapiens
gggggcacagtccaatgaggagcgagccgggtggccggctgaggggcgtgcttcatgctcgcgggatttttaaaaatggtttctcctggatcttatcccaactgcgcctgagaccttgtttcacctcctgatgtgctgggtgtggttaggcctcgagccgggagctatttgcctcccaggaggaagccagggcagggttccgcggggaatggcggtgagggagccactcgggacgcggaggccctaaaatgaagaagcttcggcctgaggcttcgggagcggcgagcagggaagtgggagtgtgtgtgggtgagtgtgtgtgtgtgtgtgtgtgtgtgtgtgtgtgtgtgaataagccagaggctgcctggtggggccccgccgtggcccagtgactgagataattgtcttcgtctgtgaggtaatgcgaacaagccccgttcccctaagccgtgatgcatgcggggttgacgcggccgggctctgtccccataaactgtgacacaggtgtgtgtagacgtctatgagggccatagcgccgggctgtaagggcatctgtaggggtgacgcagccgggctgtgtctctgcacctccgttctgtgcgaggtcaatgctggtggggtctgcagaggtggcacggccaggacgggtctccgtgtctctgaaatgtgcctttgcacttctgtcaggttgacagggacaggcagtgtctctctggtgtgagcgtctgtgggtgtgaaagggccagcgagtgtgcggctgtgactggtcgggatcgggcctggatgcatggccttttgagtgagcacaggtgtgtgcgaccatgtcacctgtctttctagtgtctccgttgcttcctgtgccttggccttccagccatgtggtacctgctagggagcagtggtcccaaagtgacgtgagaggctgtacgctgttgtgaaaatgaccaagaagaaggcttcacaagtcacgagatggcagttttggagccagaagtgctctccgtgcacactacctggaggacaagaggaagtaacctcaagaatagaattccttttggggaagaaagagctggccttcaggaaaagcatcccggaggaggaagaagaagtgttatacgtcctaaagtaaggtttcaggccagcatccttcagaaaaagcatccccgaggaggaagacgaatcgttaaacatctgaaagggtcaggccagcatccttcagaaaaagcatccccgaggaggaagacgaatcgttaaacatcttaggtcagctctagcctctcggaatttgtcttcttcagtggaaaccccgagaagactgatcagttcttcagttctaaaacaatggcccagggtttggtgacgttcgccgacgtagccatagacttttctcaggaggagtgggcctgtctgaactctgctcagagggacctgtactgggacgtgatgctggagaactacagtaacttggtctcactggatttggagtcagcatatgaaaataagagtttacctacagaaaaaaacattcatgaaataagggcttccaaaaggaattcagatagaagaagtaaatcccttggccgtaactggatatgtgaaggtacgcttgaaagaccacagcgctccagagggaggtatgtcaatcagatgatcatcaattatgtcaaaaggcctgctactagagaaggcacccctcctagaacacatcagagacatcataaggagaattcctttgaatgtaaggactgtgggaaggcctttagtcgtggctatcaacttagtcaacatcagaaaatccatactggtgagaaaccttatgaatgtaaagaatgtaagaaggccttccgttggggcaatcagcttactcaacatcaaaaaattcatactggggagaagccctacgaatgtaaagactgtgggaaggcttttcgatggggctcaagcctcgttattcataagaggattcatactggtgaaaaaccctatgaatgtaaagactgtggaaaggcctttcggcgtggtgatgagctcactcagcaccagagattccacactggggagaaagactacgaatgcaaagactgtgggaagacctttagccgtgtgtataaacttattcagcacaagagaattcatagtggggagaagccttacgagtgtaaagactgtgggaaggcttttatttgtggttcaagcctcattcagcataaaagaattcacacaggtgagaaaccctatgaatgtcaagaatgtgggaaggcctttactcgagtcaattaccttactcagcatcagaagatccacaccggtgagaagcctcacgaatgtaaggagtgtgggaaggcctttcgctggggttcgagcctcgttaagcacgagaggatacatacgggcgagaagccgtacaagtgcacagagtgtgggaaggccttcaattgtggctatcacctcactcagcacgagagaatccacacaggcggaaccccgtataaatgtaaggagtgtgggaaggctttcatttatggatcgagcctcgtgaaacatgagagaattcataccggggtgaaaccctatgggtgtacagaatgtgggaagagctttagtcacggccatcagcttacacaacatcagaaaacgcacagtggggcgaaatcctacgaatgtaaggagtgcgggaaggcatgtaaccacctaaaccatctccgagaacatcagaggatccacaacagttgaagagccttttgaacgcagtagcccgctcgtatctatggtttcgctttccacagtttgttacctgcagtcaactgcagttcaaaaatattaaatggaaaattccagaaataaagaattttaagtctcaaatggtgtgcccttctgagtagcgtgatgaaatctctcgctgtccggctccagccggccggggatgtgagtcatcccttggtccagcacatccacgctgtatacgccacccaccctgctagtgacttagtagccgtcttggtgatcagatcaactatcccagcatcacagtgcctgtgcccaagcagtcctcactttgcttaacagtggccccagagagcaggagtagtgatgctggtgattcggatatgccaaagagaagccacaaagtgcttccttttaaatgaaaaggtgaaagttctcaacttaaaaaagaaaagaaaaaaatcatatactgaggttgctaagatctacatgacaataagatattttgggagagagatacgttcacataattttattacatatattgttacaattgttctattttgttagttactgttggtaatctcttactgtgcctaatttataaattaaactttagatatgtatgtacaggaaaaaatgtagtatatagtatcgtatatatgtacaggaaaaaaacgtactatctgtggtttcaggtatccactgcgggtcttcgaacgtacccccctcaggtgagaggggactgctgtacaaagaatataggaaggcctctagactacatccattccttcctcaacaggaggaaaattcctggtacagtttaacgtaaggcttcactgatcactgttgtttttgtttttgtttttgtttttttgagacagagtctcactcttgcccaggctggagtgcagtggcacggtcttggctcactgcaacctccacctcccaggttccagcaattctcctgcctcagcctccccagtagctgggattacagacatgcaccaccacacctggctaatttttgtatttttagtagagacagttttcaccatgttgtccaggctggtctcaactcctgacctcaggtgatccacccaccttgccctcccaaagtgctaggattacaggcgtgagccactgcacctagcccactgatcactcttctgcttacagaatatcagaagtcattctagaggcaaatttgaagagtggaaaaatcactttttctgaatgatcttgtttttggtgtagatgtttttattgtgtgggttagtttaatgaatacataaagactaccagtaccattctgtctttactccgtggcatctgtggaataaccctgctaatgtaacacgtgagaaagcctttggtcatgccacccactctaccagttgtccccaccatcccccgccctcctccctgtgagacactgggccaaaggctcactacccctgtgcgttgtccagcacacagacactatgtgcattatttgtacataaggataatcacatctacctgagactgctatcatggaaattaaatgtttggtacatgtaaagtctttgaaagtgtaactggaatattgtgtaattttaataaataataactattgttgtttttatgatcattactaccatttgtgttgccattagtgaatttttacaagaaaactccctgtgggtgcaatgagtctggaaaagaccattgagtcttctagaagaaaacattaagagattattggcacagccgtgggttacgcaatgatttcttagtacacaaaacacagcaaacataaaaagttgttacacttcatcaaaagtacaaagttctgttcatcaaatgatgctgttaagatagggaaaagacaagaaacaggactggaagaagatgtttgctctaaggtacacctgacaaaggaactctcatagaaaatataaagaatccctcaagttgaaaaaaaaatcaatttaaaggggagaaaacttcagcacgtctcaacagaagaccaccaaatggccaataagtaagtgaaaatgtattcaatgtcattgctcctcaaggaactgtagagtaaaaccacaatgtgctgtcactctagacagtcaccaggatgattaaatttaaatcacaataacaaggctgatttcagatgtctcaccacaaagaaggaggataagggagcgaggtgatggatatgttaattagcttgatttaatccttccacattgtatacatgtatcagaacatcacattgtactccatcaatataatacaattattatttgtcaatcaaatattaataaaatcaaagatgagcaggaaaaaaaaaaaaaaaaaaaaaaaaaaaaaaaaaaaaaaaaaaaaaaaaaaaaaaaaaaaaaaaaaaaaaaaaaaaaaaaaaaaaaaaaaaaaaaaaaaaaaaaaaaaaaaaa

SEQ ID NO: 354 - DNA, 6852 bp, Homo Sapiens
ggtgcgcttcctgctgcgccgcggtgcctcggtcaacagccgcaaccactacggctggagcgcgctcatgcaggcggccagatttgggcatgtgagcgtggcacacctcctgttggatcacggggctgatgtcaatgcccagaaccggctgggggccagtgtgctcactgtggcttctcggggcggccacctgggtgtggtgaagctgctcctggaagccggtgcctttgtggaccatcaccacccttcaggcgagcaactggggttgggcggcagcagggatgagcccttggacatcacagccctgatggctgccatccagcacgggcacgaggccgtggtgcgtctactgatggagtggggcgcggaccccaaccacgcagcccggaccgtgggctggagcccgctgatgctggccgcactcactgggcggcttggagtggcccagcagccggtggagaagggcgccaaccctgaccacctcagcgtgctggagaagaccgccttcgaggttgcactggactgcaagcacagggaccttgtagactacctggacccgctgaccaccgtcaggcccaaaacagatgaggagaaaaggcgacctgatattttccatgcattgaaaatgggaaacttccagctggtcaaagagattgccgatgaagaccccagccacgtgaacttggtcaatggggacggggcgacgccactgatgctagcagctgttacggggcagctggctctggtgcagctgctggtggagaggcacgcggatgttgacaagcaggacagcgtgcatggctggacggccctcatgcaggcaacctaccatgggaataaggaaattgtgaaatatctgctaaaccaaggggccgatgtcactcttcgtgcaaaaaatggatacacggcctttgacctggtgatgctgctgaatgatcccgacacggaacttgttcgactgctggcatctgtctgcatgcaggtgaataaagacaaaggccggccgagccaccagcctcccctgccccactcgaaggtccgacagccctggagcatcccagtgctgcccgatgacaagggtggactgaagtcctggtggaaccgaatgtccaatcggttccgaaagctcaaactgatgcagacgctgccccgtgggctgtccagcaaccagcctttgcctttctctgacgagcctgagccagctctggactccacaatgagggctgccccccaggacaagacaagccgctctgcactccctgatgcggcccctgtgaccaaagacaatggtcctgggagcacaagaggagaaaaggaagacacgttattgacaaccatgcttcgaaacggagctcccctcaccagactcccgagtgacaagctgaaagcagtcatccccccattcctacccccttccagttttgagctgtggagctctgatcggtcccggacgcgtcacaacgggaaggcagaccccatgaagactgcgctgccccagagagccagcaggggccaccccgtgggcggcgggggcacagacactacacccgtcaggcctgttaaatttccaagcctccccagaagcccagcctcttctgccaattctggaaacttcaaccactcgcctcattcatcgggcggctccagtgggataggtgtgagccggcacggtggggagctgcttaaccgctcaggtggcagcatagacaatgtcttgtcccaaatcgctgcccagaggaaaaaagcagccggattattggagcagaaacccagccatcggtcaagccctgtggggccagcaccggggtccagcccgtctgagcttccagcctcccctgcaggtggcagcgctcctgttggcaagaaattggagaccagcaaaaggcctccatctggaacttccactacctccaagagcacctctccaaccctcacgccctccccctcacccaaagggcacactgcagagtcctcagtgtcttcctcgtcatcccatcggcagtccaagagcagtgggggctccagcagtggcaccatcacagatgaggatgaactgactggaatccttaagaaattatcacttgagaaatatcagcccatttttgaggaacaagaggtggacatggaagcgttcctcacactgactgacggtgacttgaaggagctgggaattaagacagatgggtccaggcagcagattctggcagcgatttctgaactgaacgcaggcaagggacgcgagagacaaattttacaggaaaccattcacaactttcactcttcctttgagagcagtgccagcaacaccagggcccctggcaacagcccctgtgcgtgatcctccttcccgcagccaccagcgtgagctctctgaatcccgggaccccttcacgtggccacagccccagccctgcccccgtcacactgctgtgccttagtcatgttgttccctttgctcgggatgcccacttcacgtcgacggcattcattggtagtacttcttgctgcaacaaacttcaacacacagagacagattcccatgtaacagtccagtgggagtgcttctgcttggcacgttggttcacacagtgatgcagggactcagctcctttcatcctgtgctctgccctccccgggagcctcagagtttgcttctggctggcggcaagggaaagggacgatggagaaggcacggctgcttcttacctgccttgctcttaactgacacacatcactcctgctcacgtcctcttggccactggtagtcatgtggccccacctggatgcagaggaggccagggtgtgcagtctccacatagtggcttcccagcaacaacttttgacttagatggggggtatgtattatggtgagaggttagccttcctggcacatcttcccttaaaacttctaacttgcccctcctagtccaagtcacctctcagatgaagtcttttttgaccccctttcagccactgggtcccttagtgctgtgtatgtgactgctgtagcattccactgcacctgctgcatacagcttacattggagatgtgtatgtcaaacgcatttttctttattgcaaagagagtctattatagaaggaaagaagtggaggcctgctgtgtggatcccttcttcttcctagctttcagtttccttatctgcaaagtggaaggtcagaccagatgatgctctggtactccacagtgctcacctgtatcactgcagggctttctgcactgaaagtggaagcagaaggctaatgggtcacattgtgtaaaggtctctggtgctcaaagtttctaggcaaagaagtgaaaatttggaattttgtctacatcctattaatgctgtgttcctcaaaagggaattggcttgtgtagtttcctaccataccatattttattaaattagaggggccctgacttttaaaacccactggctttctgaagtgttttccagtgaatgactcattcagccagtgcttgttgcatttatgttagctaccaggtgccaagtgtgcagacacaatacagagccttcaggctctcgacaggcaagagaacacctgtaaatagatggtcccgacattgagaggcagcatggtagagtgggcagaccttgtgctctggactcaggttcaaagttcagatgaagctcaatggcctcttagttggagcttagaaccagtatgcccaaagtgctgggtctgcaggaagtacccagtcgatggtaggctgcacagaattctgatctctaccttgagccatgctgagccacaagttggtctccttgggaggtgccatctctcatctgtccctcccccagccatgaaagcccattcccctatgctggctttcagaggctgtcgttaacttactgcccagagcctcgtagttttcttcccctgccctgatggttgggtgtttttcctttaaattctctcagccttacactcacagaagccaactttccacaggactgaagacaaagtgtttcatttagctgttactgatagacacctttacaaaggttactaatgtcccagcctttttaaggagacacactcattcatcccctactatgtgctggcagctttacctttgtcatttcatcctcatggccaccctggaggtggcattgtgtaacctcatcttgcccattcgggaaacggatgcttaggagagggaagcagcttgccagttaaacagcccagaaggagcagatctggggtcagaaccggacctggtgggcttgcaagcctgtgccttttccactaactcctatagactcctggagctagaagcacttgtgattcttgttttaatttactgatggcttcaggggttaacagtaggcctagaattgtttgcctctgaaattcatggcccctgacgttatgtgctttgaggttttgtgcctgctttttgctgtggtcctgtttttttcataacaatatactggtatagcttccactcaggtaagtttgattgaacaatgatacacagctgcaccggggggtcaccttttcacaaatgtagacctccatgaactcattggatgaccctggacagagcggggctattcccattttgcagacaggacagcagaggctccagacaatgcctttcctttctttttcactggactcaagtgtccaaggcttttcatcctaggaagtttgtgtgctggttcacaagaggtccctggcaccctttctggggatgtttggatgcggctggtaggcagggaagagaaagggcaccccagcgggggcatgtgtggaggcagcacggaacatgtaggttatagatcgtcagggaggaggggtcagttgggtgcttgtttttctgatttttggtccttgatcacccccttcccttcccacacgtgtccccagcctgcctgtggctgttccccccacaagaagcacctcccttgcttggcaaccttcaccagcatttcccaaaagtatgctcctgggaaccctagttccacaggataataggtttttcataaagaaacgtagggtgtgtatgtgaaagtggggtgaggttccctggttgagtaggtttggcagacactaaagcgagctacacgatcatctttgctacaggcctctcacaaccttcagcatgccagcatgggtcaggcctcttcacagggccaagaaactcatagcatctcccacattactctcatcacttctccaaggtgcttttgcaagactggaattccttgaacaccattggagaagccccgctttttctggaacagcggcaaccaagaggccttgcagccctggaagtgggtcagggcccttggtggtcaccttttctccccagcagctctgcagaggtggcctgcttggcagtgggacatcaggggaccggtcctgctttgagatggcagggtccctgttctgagagctctccagcctgagggcattgagctgaggctccaccctgagctctcctgcagggtggagggcattgtttcccagcacccaggcagtgtcttgctggtgtgtcgtgagtgctggatgtccaagtccctgctggccacggagggctcctgcctctcttcttcagcgccacaaaattacatggaggccagctggttttgtgaggagattgtttattttttaattcttttgtttaccgaacgtttactgagcatctaccctgtgccagccctactcgtacgctctgtctccaaagatgaaaaaggacttctctgccctcaagggaaccccacagtatcttagaggagacaatcatgtcggtgagatggtgtggtgatgaagcctgctgggtatacagctcagggaaagtcatcgatgatggctcaggctcagcctgggcacgccccagaggagagagatggagtggggcctcaaagggcaggtttaggcagaaaagaaaaagggcattccagctggggcatgtgcaaaggcagcacgtaatgtgtaagttctagatcgtcagggaggaagggtcagttgggtgcctgtttttctgtttttagtcctttaaaatgagtagaagcaacctgttaccctggaaagagcactggacatagacctagtgctgcgtgatgttgagcacgtttcttcttccctttgagtcccagtttcccttttggttacagggggatagtagcccccagggatcatgtgaaagtgagaaagcccttttcacactgtggagcggtgcagatgtgggaaacctcaaagatggttgcccattttaaatcctttcatctctcatctctctttcttctctcccttctgccctgacgtagccatggttgggtgggtgaggccagaagaaactgcctccggcaagaggtagcagccgctcaggtggctctgctggcatcggagcccacagaagtgaggagtggccgatggacctgccctccaaatgtgcctgactctgggtcttgctgtcactggatttcctggcatggcagacagaaagaaagatagtttgaccaagtcgtagaagctgatccagcgggtaaaaagggggcagggaactcgtcccttttattcttgcctcagagctgcctgaagacatgggccaggccggaggctggacaactttggataacgctgacctgtacttccaagtaaatgcctcctgaagagcccgggacccttcctgggagaattctgcagccagaatgaaggtgccatcagcaggaggcactgtgaagcaccatcctgtcgctgtccttgtccattcctagcaagttaatcgtgtcttgttaaccagcagttcctgttcaacgtgtaaagagacctgatgttttccctaataaagctgataacagaaaaaaaaaaaaaaaa

SEQ ID NO: 355 - DNA, 5039 bp, Homo Sapiens
caagccgactgtgagccaggaagtgctcttggggagcccaggccaagccatccattcttgggtcctttggagggtagatatggattcccagtttctccagcggccagtgctccccctagtccacacagtgagaccgtgaaagcagatgctccggggcactcctgggcagcttttgctcagtggatgatgggtgactacagactccctgaccacccccagcccatggaaattctcaacctgtacttgggagacagcctggagccccacccaggagagtgcccaagggaaacgtgcagccatgaggatccaccggagcctttcgaggagcaaacctgggccactgaccctcctgaacctaccagacaaaatgttcctccctggggctccggtgtggagctcacacacctggggagctgggtccatcaggacgggctggagccttgccaggagcaaacccgggccactgaccctcctgaatctaccagacaagatgctcctccctggggctccggtgtggagctcacacacctggggagcccctctgcccagagggagcacaggcagaacacagcatcaccagggtcaccagtgaacagccatctaccggggagcccaaagcagaaccggagcacgtccacacaggtagtgttctgggcaggcatcctgcaggcccagatgtgtgtcctagacctggaggaggagctggagaagacggaagggctcaaggctgggctgaaatgctgtctccccacgccccctgtggacctccccggggacacgggcctgcactccagcccacctgagaatgaagactcaggggaagacagcagtgagcctgagggagagggccaggcatggctgagagagggaaccccagactcttccccacagtggggagctgaggaggagagcatgttcttcagcaaccccctcttcctggcgagtccttgctcagagaacagtgcttctggagagtgcttttcctggggggcttcagactcccatgcaggtgtgaggactggacctgagagcccagcgactctggagcctcccctcccagaagacacagtgctgtgggagctggaaagtgagccagatttgggggacggcgctgctatcagtgggcattgtacccctccattccctgtgcccatctataaaccacactccatctgctgggcctcagtggctgccgctgagggggctcctgcagcacctcctggtcacggggagagtgagggagataggcttggtcctgctccatctgcagcaccgtgtgtggacgaagcattgacctgggaatcaggatgtgtcggatctgatcttggccctgctgcacatcctgtgcaaccttgggcctctctcagccctgagggctggcagagaggaggtcctttttggccccaggtgactcttaactcccaggacagagatgagagggagggtggacacccccaggaatctcttccctgcaccttggccccctgcccctggaggagcccagcttcttctccagagcctagcagcccagaatctgagagcagaggccctggtcccaggcccagccctgcatcgtcccaggagggcagcccgcagcttcaacaccacagctcaggcattttgcccaagtggacactagatgcttcacagtcttcactcttggagacggatggggaacagccaagttccttgaagaaaaaggaggcaggggaggccccaaaaccaggcgaggaagtaaagagtgaaggaacagccaggcctgcagagactggagacgtccagcctgacattcacctgacttctgcagaacatgagaatctgaggacaccgatgaactcttcttggcttcctgggagccctatgccccaagcacagtccccagaggaaggccagagaccaccagctggagacaagctagctaatggcgtcaggaacaacaaggtagcctggaacttggcctcacgcctctatcgcctggagggcttccggaagtctgaagtggctgcctacctgcagaagaacaatgactttagcagggctgtggctgaggagtacctgtccttcttccagtttggaggccagagtctggaccgagccctccggagcttcctccaggccttggtgctcagtggggagactcaggaacgggagcgaatcctctaccagttctccagacgcttccaccattgcaatccggggatcttcccctcagtagattctgtacacaccttgacatgtgcaatcatgctgcttaacacggacctgcatggacagaacattgggaagagcatgagctgccaggaattcataaccaacctgaatgggctgagggatggcgggaacttccccaaggagctgctgaaggccctctactggtctatccgcagcgagaagctcgagtgggccgtggatgaagaagacacagccagacctgagaaggcccagccgtccctgccagctggcaagatgagcaagcccttccttcagctggctcaggatcccacagtgcccacctacaagcagggcatcctggctcggaaaatgcatcaagatgcagacggcaagaagacgccatggggcaagcgtggctggaagatgttccacaccttactgcgagggatggttctctacttcctgaagcagggagaagaccactgtctggagggggagagcttggtggggcagatggtggatgagcccgtgggggtgcaccactcgctggccacccccgccacgcattacaccaagaagccgcacgtcttccagctgcgcacggctgactggcgcctctacctcttccaggcacccactgccaaggagatgagctcctggatcgcgcgcatcaacttggctgcggccacgcactccgcgccgcccttccccgccgctgtgggctcccagcgcagattcgtgcggcccatcctgcccgtgggccccgcccagagctccctggaggagcagcatcgatcccacgagaactgcctggacgctgccgcggacgacctgctggatctacagaggaacctgccggagcggcggggccgtggccgcgagctggaggagcaccgcctgcggaaggagtacctggagtacgagaaaacccgctacgagacctacgtgcagctgctggtggcccgcctgcactgcccctctgatgctctggacctgtgggaggagcagctggggagggaagctggaggcactcgggagcccaagctcagcctgaagaagtcccactcgagcccgtccctgcaccaggatgaggctcccaccacggccaaggtgaagcgcaacatctcagagcgcagaacctaccggaagatcatccctaagcggaaccgcaatcagctgtgaagccagcaccacctcagagacactgttccctgctccagggtagacctgagatgaacctccctggaggagacttatttcaatgagtccaccatgacggatgaggcacctcctttccctgctgaaggacaaaccttgtttccctgtggccctcattcttgtgctccctgaagctttcctaatattgctgtgctccccaccacccccatggcagtccctccgcagccccagtccctggccacgcccaagggaagagggaggtgaggacttgactttcctcccagagctcagcccatgtcaccctccaggccccagaatccagagtggcctcatttcctagacttgctgagaactcagcacttgtttgagaaccagtgcttatgtggtgtgcccttggcttctgggggagagcttggggcagcagaggcccctgggcagcccagccaggggagccacagccccgaggatggtcttgctctgggaattaggtgaccttcctggggaggccccaggagagtgaatcagggactcttgagaaattcctaaccagcctcctgtgacccagggagcagggtcgctaaggtcctgcccactgaggggacagccttctgggcagggacctcggggggcttcaagggctctgcacggctgtggggccctgtgcctttgtctccttgtgtctcctttcccccgaagtagatgaaacagtctcacatacccaactgctcatcaacagagcagagctgatggcatgagtgagggctgggcggggtggggcctccagagctttgcagggaaccctggaaccctaggaacaaggagcctttgttccaacagagcagagaaggaggttctctatgttcagaccactggagaggatagagaggtaaaaggtggcgacagtttcccttaggggtctgcctggcaggagccacagctcaggagagttgtgagggatgggacggaggctggcgaccaggcgaggcctaggccaggctcgggagacttttctgtgctcctttctacacatgccttaaaccttccttcctgtggggtgcctggaccccttccccatctctggcagctcagagggtctctgctgctctcccctgggaaatcccctcatcctgccctctggctgcctcccagctgggcttgttctctgagggaggttccggagactcatggacttggggctctgcctgtaggaaggaggctgggccggagggaccagccaccattgtctctgttcagccaagtgtgcaagtaggctgcccgccaagagggggcctctgctacccgctgctgcctgccggctgacacactgcctccccagccttcctgctaggccaccctcctcccttcccatgcttgtaaccagctctggggcttgcacctccacaaagtaaggttggcccttggaggccatgtttgggtctccggccagggcctagggctaggccatgcacccaatgggtgcacaataaataacaggtcaacaaagagggaggtgtgtcagtgtgtgaggaagggaggtcaggcagctaggaccacctgcagtgtggcaggcttcatccctctttgctccaagtgtgtatgtgtgtctgtgcatgtgtgtagtgtctgtgtctgtgtgttcatgcatatgcaggagtcacacggtcataggccatcaaagctggaggaga

SEQ ID NO: 356 - DNA, 4299 bp, Homo Sapiens
acgtaccagggctcattgcgtgacggttacacttccggcgggctacgtgcgcgcggcgagcgccgggcgtacttttgcgtggttgctccaccccctcagccttgccttcgccgccgttggggctggaagttcccgccaggtccgtgccgggcgagagagatgctgcccggcccgcctcggctttgaggcgagagaagtgtcccagacccatttcgccttgctgacggcgtcgagccctggccagacatgtccacagggttctccttcgggtccgggactctgggctccaccaccgtggccgccggcgggaccagcacaggcggcgttttctccttcggaacgggagcgtctagcaacccttctgtggggctcaattttggaaatcttggaagtacttcaactccagcaactacatctgctccttcaagtggttttggaaccgggctctttggatctaaacctgccactgggttcactctaggaggaacaaatacaggaacgccagccactacatctgcagctacaacaggcttcagtttaggattcaataaacctgcagcatctgccacaccatttgctctacctattacctctacctcagctagcggtctgactctttcgtctgctctgacatcaactccagcagcatccacaggatttactctaaataatttgggtgggacaacagccacaactacaactgcatcaacaggcctctctttagggggagccttagctggtttgggaggttcacttttccagagtacaaacacaggaacatcaggacttggacagaatgctttagggttgactttgggaactacagcagctacttcaactgcaggcaatgaaggccttggtggtatagatttcagtagctcctcagataaaaagagtgataaaacgggaacaagaccagaggatagtaaagctctgaaggatgaaaatctacctcctgtcatctgccaggatgttgaaaatctccagaaatttgtgaaggagcagaaacaagttcaagaagaaattagtagaatgtcttcaaaagcaatgcttaaggtacaagaagatattaaagctctgaagcagctcctgtcgttggctgccaatggaatacagagaaacactctcaacattgacaaattgaaaatagaaactgctcaggagttgaagaatgctgaaatagctttaagaacccagaagacaccacctggacttcaacatgaatatgcagctcctgctgactacttcagaatcttggttcagcaatttgaggtacagcttcagcagtacaggcagcagattgaagaactagaaaaccatcttgccactcaagcaaataattcacatataacccctcaagatttgtcaatggctatgcagaaaatttatcaaacatttgtagctttagcggcacaacttcagtctattcatgaaaatgtaaaggttctgaaagaacagtaccttggctacaggaaaatgttcttgggagatgctgttgatgtgtttgaaacaaggcgagcagaagccaagaagtggcagaacacacccagagttactactggacccactcctttcagcaccatgccaaacgcagcagccgttgccatggctgcaacacttacacagcagcaacagcctgctacagggccacagccatctctgggagttagttttggaacgccattcggctcaggtattggcactggcttgcaatcaagtggcttaggttcttcaaaccttggaggatttggaactagctctggttttggatgcagcaccacaggggcctccacatttggatttggaacaacaaataaaccctcaggaagtcttagtgcaggctttggcagctcaagtacatctgggtttaacttcagcaatcctggcatcacggcatcagctggtttgacttttggggtgtccaatcctgcctctgcaggttttggaacaggaggacaactccttcagttgaagaaacctccagctggaaacaaaagaggaaaaagataaacatgggttgatgtgttgagagaatccatagcagcaccgttcattctatgagtctatttttctaatgatgcagtaattaaattgcatcccaggagatttataaagttttgatatttttccctactctggaatttgaactttcttcatgtttgccatactgaacatcttttttcttgtggaatttaaagtccagctgtgttttctttttaatttgattctcagtgtaagaaatgttctgattacatcactgattggtaatggttagaaaccattaacctaaaacttactatttaacctagtgtttttgttgatgaggtttacattatgtgaatacatgcacatttgtttcttatacaggtggtgtgaactctagggcctatactagaatcaatttgttccttgttaaaggccttttgaattatactgcagggcatcttgtgaatatgtatgtaaatatatacagaataatacacacagttgtgtgtgcatataaaatacatatttacgccaggcgtggtggctcacgcctgtaatcccagcactttgggaggccgaggcaggcggatcacctgaggtcaggagtttgagaccagcctgacatggtgaaaccccatctctacgaaaaatacaaaaattagctgggcatagtggcgggtacctataatcccagctactcgggaggctgaggcacgagaatcacttgaagccgggaggtgggggttgcagtgagccgagatcacaccactgcactccagcctgggcaacaagagcaaaactccgtctcaaaaaagatgaaaataaaataaaatatatatttacaggcctacaacttttgcctcagactgttccccttttctaagggtattcaagttttcaccttttaagcttcatatcctcagtgcttgtagaatgatgagcttagaggtaccaggtcattgcagttgtttgcttaaagacttattgaaatggttactggcgtaaatacttggccaactcaactttattgcccctgatcttttccatttttgtttccaccttaacctatagcagctcctccaaatgaggaatgctgtaagtaagactcatcaaacagattttaaccattttattatcctgtgtgtccttacattgcttctgtgagatgtttttttcttatctgagatgaactttcaggagcctatttgaactccagactggtgttctggggcaaagagctattagccaaactgattctatgcaggtgaaggatgcactaaagttctcactttagtgagaacttttctagctattccaatacagagttctttcttatagggctattgatattgacaccaaatggagtggcttctcagcctcttaatgtcttaagtaagtgcttaatttggaatagagaaaccagtatattttaaaaaagaaaaatattctttgtagcaactgtaaattctcccattataacagtgaacagagctccaggtaataacgcataggcatgtcaggttgcatctgtatatttgactacattagtattagtgacatcaggtggatataaaagaaaacccttggaaagagaactgccttagccatgatttcgttagtagacctatttatgattcaattgcaattttcagataggatgtgaacatggaatttcattgaaaatagtttaattttttatataaaaggttttgtatataatgtgtgtcagtgactattttcaaaatcattttcatcaagacaccttttttctaaaataggcattgcatacacatatgcacacgtatgtgcatgtgccacacattttttgtataatgttgggtttgattataaaagtgttgtcaaatgttttatttatctgcatatagcagtggttggcttttttgaattgaaatttttgcgcattgatgcattgaaataaggaaaattatttatctctgagcactaaacttatttttgcatatttctgtaatattgcagtccccagatccagaacatgggaagttagggaaaatgtgtgattttgtgttttgaattactgtcagaattacatacacaattacaacaaactttttttaaaagacatttcattgtactgcaaaaatctgaatatttatatttcttgtttttttctttatatgttttgcattttaatatgttgagccactggaaatttgtaacagattaatttgttataggagtttaaatgtgttgtcattgtctccattgtctttgtccagagcctattattatggaaacaataaaatttattgtgtcagttgctttgattcttta

SEQ ID NO: 357 - DNA, 3540 bp, Homo Sapiens
actgcgcgcatgcgcggcggccgccgaaggggcgggatccgaggcaagcgttggttctgtgcgcctcaggagtataatgtctcaggaaggcgattatgggaggtggaccatatctagtagtgatgaaagtgaggaagaaaagccaaaaccagacaagccatctacctcttctcttctctgtgccaggcaaggagcagcaaatgagcccaggtacacctgttccgaggcccagaaagctgcacacaagaggaaaatatcacctgtgaaattcagcaatacagattcagttttacctcccaaaaggcagaaaagcggttcccaggaggacctcggctggtgtctgtccagcagtgatgatgagctgcaaccagaaatgccgcagaagcaggctgagaaagtggtgatcaaaaaggagaaagacatctctgctcccaatgacggcactgcccaaagaactgaaaatcatggcgctcccgcctgccacaggctcaaagaggaggaagacgagtatgagacatcaggggagggccaggacatttgggacatgctggataaagggaaccccttccagttttacctcactagagtctctggagttaagccaaagtataactctggagccctccacatcaaggatattttatctcctttatttgggacgcttgtttcttcagctcagtttaactactgctttgacgtggactggctcgtaaaacagtatccaccagagttcaggaagaagccaatcctgcttgtgcatggtgataagcgagaggctaaggctcacctccatgcccaggccaagccttacgagaacatctctctctgccaggcaaagttggatattgcgtttggaacacaccacacgaaaatgatgctgctgctctatgaagaaggcctccgggttgtcatacacacctccaacctcatccatgctgactggcaccagaaaactcaaggaatatggttgagccccttatacccacgaattgctgatggaacccacaaatctggagagtcgccaacacattttaaagctgatctcatcagttacttgatggcttataatgccccttctctcaaggagtggatagatgtcattcacaagcacgatctctctgaaacaaatgtttatcttattggttcaaccccaggacgctttcaaggaagtcaaaaagataattggggacattttagacttaagaagcttctgaaagaccatgcctcatccatgcctaacgcagagtcctggcctgtcgtaggtcagttttcaagcgttggctccttgggagccgatgaatcaaagtggttatgttctgagtttaaagagagcatgctgacactggggaaggaaagcaagactccaggaaaaagctctgttcctctttacttgatctatccttctgtggaaaatgtgcggaccagtttagaaggatatcctgctgggggctctcttccctatagcatccagacagctgaaaaacagaattggctgcattcctattttcacaaatggtcagctgagacttctggccgcagcaatgccatgccacatattaagacatatatgaggccttctccagacttcagtaaaattgcttggttccttgtcacaagcgcaaatctgtccaaggctgcctggggagcattggagaagaatggcacccagctgatgatccgctcctacgagctcggggtccttttcctcccttcagcatttggtctagacagtttcaaagtgaaacagaagttcttcgctggcagccaggagccaatggccacctttcctgtgccatatgatttgcctccagaactgtatggaagtaaagatcggccatggatatggaacattccttatgtcaaagcaccggatacgcatgggaacatgtgggtgccctcctgagaatcttgaggcactgtgaaatttaagtgtaagacattgagccacaaacatggaatctcttctttgtactggatgtccacttcccttaaagtcttatttgcacccttacaaaatctttccaaaggtcactcttatgaatggatgttggttatacttttaatggacattaacattcctaataaagtattagtttcttaattcacttttatatgttttggaaagaaaattagtgaacttctctatgttaaaaatacgtactgcttgagtatcccctgtctgaaatgcttgggaccagaagtgtttcagcttttggatttttttgaattttggaatatttgcatagcataatgagatatcttgggaatgggacccaaatctaaacacaaaattcatttatgtttcatatacaccttatatacaataacctaaaggtgattttatatgatattttgagtaattttatgcatgaaacaaagttttgacaggcttttgaccgtgattcatcacatgagttcaggcatggaaattttcatttggagcatcatgtcagcactcaaaaagttctggatcttggagcagttcagattttcagattagggatgctcaaatctatatagatataaaattatcctcacagtaacatagaatctcttggtgctgtcagctgttgggaattgaagattgactttgtgcttccaccctccatccagaaaggcacccttcattccaccagaactttacccaggaagaacacgatcatttcctttttcaccgatgccctctctcagctttctgagtacgtctcttggggtcgctggaggtgatcctaggatctgtctctgagaccaatgtgctgtttcagccccctgcagctaagaattgtattgactgtcctcacagcggcttttcatagctttcagcttcagctttacgaggcttctcctctctccctggcaccctgctggctgcctcactgcttacagacaggtcccaccaaacccaaacacctgcctagggtaaatgggtctctcttctatccccagaaactttcagaggaagcagctcatagaaacatacaaaagcacacaagtattttgggaaaaaatcctaaaaggtgacttaatttgatgccttaaattcacaagtgaggaagctaaggcctagaaggttaaggatgtccccagggtcacacagtgagcggggctcagagcttgagtgtctttgtgctttgtgtacattgtgttctccctagggtgctttagaccctgtttgttttcttctgcatgaggctgatttccagtttgtcatcaacctctttatcttataatttaggatagagttgaacgttagtcttgaaagattttctaaagtagtctttcaaactgttcctcagaggcctaggattttccaaaagtaccttaggaaccttgtaggctgcagtgggggtgtggcgatagagcaggaggcagggagacagggctgcagggcctcccaccttccaacagacaggctctgctgtatctgttgtacatactgggattctgtaaaggacattatctggggtgttgtatgtatttttgtgtgttctgctttttttaaataaacttgaaaagctactgaaaaaaaaaaaaaaaaaa

SEQ ID NO: 358 - DNA, 2019 bp, Homo Sapiens
gtgtgaccctgccgggccaggagccgggaagaagagccggtgttctctctgttcctcgctagcagcttgggacattagcgccgagatgtgccccatatctgagctgccttcagctccttggaaacggatccaggtttttcctaccccttccgactgccccatccctctccagagaatccttttctgccctggtgatcaaggcgcgtcaattcaactctccctagagtggccacagtactggagatccaaagatgacttaagacatggtacctacgctggctctagtggaggagacagacacgtagtcaactgaactattttacaaacctgaaatatgtgccacattgagataaatccaaaatgcctagaatctttgttcagctcccctttacttagttcttaagcccaaaagaggtcttcattctgcttacagctcctggtgctctaactccagagcattttgcatacatctttagggttattctcacattgaactgtatttttgtgaatgcctttctgtccgaatccaataccagtggtctaacaattcacaaaagaaaacagaaatattggaaactgtactatggagaaattagggacaaaaggtaacagtatattgatattaacattgctgctagtcctttgcactagtaaataactgctatttgataaatgatcacaatgtgtaaaacactgtagttacaagatctcatttaatccgcctaacaaccttgccaagtattaataaaacccgttttaggcgctgacactgacctacagcgcctcagctccagcgccatggcgccctccaggaagttcttcgtggggaggaactggaagatgaacgggcggaagaaatgtctgggggagctcatcggcactcagaacgcggccactgtgcctgccgacaccaaggtgatttgtgctctcgccactgcgtataacgagttggcccggcagaagctagctcccaagattgctgtggctccgcagaactgctacaaagtgactaatggggcctttactggggagatcagccctggcatggtcaaagacttaggagtcacgtgggtggtgtggtcctggggcactcagaaggcgtgtctttggggagtcagatgagctgattgggcagaaaagtggcccatgctctggcagagagactcggagtaatcgcctgcattggggagaagctagatgaaagggaagctggcatcactgagaaggttgtttttgagcagacaaaggtcatcgcagataatgtgaaggactggagcaaggtcatcttggcctatgatcccgtgtgggccactggtactggcaagactgcaacaccccaacaggcccaggaggtacacaagaagctccgaggatggcttaagtccaacatctctgatgcagtggctcagagcactggtatcatttatggaggctctgtgaccaaggcaacctgcaaggagctggccagccagcctgacgtggctgccttcctcatgagtggtgtttccctcaagcccgaattcgtagacatcatcaatgccaaacaatgagccccatccgtcttccctacccttcctgccaacccaggaactaagcagcccagaagctgagtgactgcccctcccctgcacatgcttctgatggtgtcatctgcaccctattgtggcctcatccaaactgtatcttcctttactatgtataccttcaccgtgtaatggtcgggaccagaccaatcccttctccacttactgtaattgttggaactaaatgtcaccaatgtggcttctccttggctgagaggtgaaagggatggaatttgctcctgggtcccctaggccctagtgaggggaggagagagaacccatcctctcccttcttacactgtgaggccaagcagaagccaggggtgctgccctctcccacggtgccaacgcctttgtgtgttgtgtatgtgagccatcccacatgtgagggaaataaacccctggcacttaaaaaacaaacaaaaaaacgcatttt

SEQ ID NO: 359 - DNA, 7169 bp, Homo Sapiens
cacggtgcctgcacgggacgccgctcgatccccgagccccctcgccgtccccgacagcccccccggcgccatgcaatcccggcttctactcctcggggcacccggaggccacggcggcccggcctcgcggcgcatgcggctgctcctgcggcaggtggtgcagcgcaggccgggtggcgacaggcagcggccggaggtcagactgttgcacgccggctcgggggccgacacaggtgatacagttaatattggagatgtatcctacaagttgaaaattcctaagaatccagaacttgtgccacagaactacatttcagactctctggctcaatctgtagttcagcatctaagatggataatgcagaaggatcttttggggcaagatgtttttctaataggacctcctgggcctcttcgacgctctattgctatgcagtacttggagctgaccaaacgggaggtcgaatacattgccctgtcaagggacaccactgaaactgatctcaaacagcgacgagagatccgtgcaggcacagccttttacattgatcagtgtgcagttcgtgcagccacagaaggcagaactctcattttggaaggtttggaaaaggcagagaggaatgttttgcctgttttgaacaacttgctggaaaacagagagatgcagcttgaagatggacgcttcctgatgtctgctgagcgttacgacaaacttctccgagatcataccaaaaaagagttggattcttggaaaattgtccgagttagtgaaaatttccgagtgattgccttgggcttgccagtgccaaggtattctgggaatccattagacccccctcttcgttctcgatttcaagccagggatatttattatttacccttcaaggaccaacttaagttgttatattcaattggagccaatgtttctgctgagaaagtttctcagctcttgtcctttgccacaactctgtgttcccaagaatcttctactcttggacttccagactttcctttagatagtttagcagctgcggttcaaatcttggattcctttcctatgatgccaatcaaacatgcaatccagtggctttatccatatagtattttactaggtcatgaagggaagatggctgtggaaggtgttttaaagcgctttgaacttcaagattcaggaagctctctacttcctaaagagattgtaaaagtagagaagatgatggaaaaccatgtgtcccaagcttctgtgaccatccggattgcagataaagaggtgaccattaaggtgccagccgggaccaggctattaagtcaaccttgtgcgtcagaccgtttcatacagactttgagccataagcagctacaggctgaaatgatgcagtctcacatggttaaagatatatgtttaattggaggaaagggttgtggaaaaacagtgatcgctaagaactttgccgataccttaggatacaacatagaacctattatgctctatcaggatatgacagcgcgtgatctgctacagcagagatacacccttccaaatggagacactgcctggcggtcctcaccccttgtgaatgctgctctggaaggcaagctggtcctgctggatggcattcaccgggtgaatgcgggcacgcttgctgtattgcaaaggttaatccatgatcgagagctaagcctctatgatggttctaggctgctgagagaagacaggtatatgcgtttaaaggaggagctgcaactgtctgatgaacagctacagaagagatccatttttcctatccatccctccttcagaatcattgccttggcagaaccccctgttattggaagcacagcacaccagtggctgggaccagaattcttaaccatgttctttttccattacatgaaaccacttgtgaaaagtgaagaaatccaagtgattaaggaaaaggtcccaaatgtacctcaggaagctctggataagttattatcatttacacacaaactcagagaaacacaggatccaacggcacaatcattagcggcatcactttctaccagacaactgttgcgaatttctcgtcggctgtcacagtatcctaatgaaaatcttcacagtgctgttactaaagcctgcctttccaggtttttacccagtcttgctaggtcagcattagaaaaaaatctggcagatgctacaatagaaataaatactgatgacaatttggagccagaactgaaggattacaaatgtgaagtaacatctggaactctgaggattggtgctgttagtgcaccgatctataatgcacatgagaaaatgaaagtgcctgatgttcttttctatgacaacattcagcatgtgatagtgatggaagatatgctgaaagactttctccttggagaacacttattattggttggcaaccagggtgtaggaaaaaacaagattgttgacagattccttcacctgctcaacagaccccgagaatatattcagctacacagggataccacagtacaaactcttacgcttcagccttcggttaaagacggacttattgtatatgaagactcacctttggttaaagcagtaaagttgggtcatattctggtagtagatgaggctgacaaagctccaacaaatgtcacgtgtattttaaaaactctagtagaaaatggagaaatgattctagcagatggaagacgcattgttgcaaattctgctaatgtgaatggaagagaaaatgttgtagtgattcatcctgattttaggatgattgttctggcaaatagacctggatttcctttcctaggcaatgatttcttcggtaccttaggtgatatttttagctgccatgcagttgataaccccaaaccccactcggagctcgagatgctcagacagtatggaccaaatgtgcctgagcccatccttcagaagcttgtggctgcctttggagagctgaggagtttggctgaccaagggattattaactatccttattctaccagagaagttgtcaacatagtcaaacatttacagaaatttccgactgaaggtctctccagtgtagttcgaaatgtgtttgactttgattcctacaacaatgacatgagggagatattgattaacactttacacaaatacgggatacctatcggagcaaagcctaccagtgtgcagctggcaaaggagttgactctgccagaacaaacgttcatgggctactggacaattggtcaggcaagaagtgggatgcaaaaactcttgtgtccagtggaaactcatcatatagacataaagggtccagcacttataaatatacaggagtatccaatagaaagacatgaagaaagatccctaaactttactgaagaatgtgcctcatggagaataccattggatgaaattaatataatctgtgacattgctacatcacatgaaaatgagcaaaatactctctatgtagttacatgcaatcccgcttccctgtactttatgaatatgactgggaaaagtggcttctttgtggacttttttgatatcttcccaagaacagccaatggcgtttggcacccttttgtgacagtggcaccgctgggaagtcctctcaaaggtcaagtggttctccatgagcagcagagtaatgttatcctgttgttagatactactggccgggcccttcatcgtctcatcctcccttccgagaagtttacatctaagaaacctttctggtggaacaaagaagaagctgaaacttataaaatgtgtaaagaattttcacacaaaaactggctggtgttctacaaagaaaaagggaacagcctgactgtgctggatgttctagaagggcgaactcacaccatctcacttcccatcaacctcaagacagttttccttgtagcagaggacaaatggcttctggtggagagcaaaacaaatcagaaatatcttttaactaagcctgcacacatcgaatctgagggtagtggggtttgccagttgtatgtgctgaaagaggagccgcccagcacagggtttggagttacacaagaaacagagttcagcatacctcataaaatttccagtgatcaactatcatctgaacatctaagttcagctgtggaacaaaagattgcctctcccaacagaattctctcagatgagaaaaattatgctacaatagttgttggttttccagatctcatgtcacccagtgaagtttattcttggaagagaccatcatctttgcataaacgaagtggcactgatacatcattctatagaggaaagaagaaaagggggactccaaaacaaagcaattgtgtgactcttttagatacgaatcaggtagtgaggattttacccccaggagaagtccctctaaaagatatctacccaaaagatgttactcctccacaaacatctggttatatagaagtcactgatcttcaatcaaagaaactccgatatatccctattcccagatcagaatctctctcgccgtataccacatggctgtcgaccatttcagacacagatgcactgctggctgagtgggacaaaagcggtgttgttactgttgatatgggaggtcacatcaggctttgggaaactggacttgaacgtctgcagcgatcactcatggaatggagaaacatgattggacaagatgacagaaatatgcagataacaatcaacagagacagtggtgaagatgtaagctcccccaaacacgggaaggaggacccagacaacatgcctcacgtgggcggcaacacttgggctggcggaacagggggaagagacacggcaggcctgggtggcaaaggaggcccttaccggctggatgcaggccatacggtgtaccaggtctctcaggctgagaaagatgcagttcccgaagaggtcaagagagctgctagagagatgggccagagagcattccagcagaggctaaaggagatccaaatgagtgaatacgatgctgcaacctatgaaaggttttcaggtgctgttcggcgacaggtgcactccctccgaatcatcctggataatttacaggctaaaggtaaagaaagacaatggctaagacatcaagctactggagaattagatgatgccaagatcattgatgggctgactggagaaaaagccatctacaaacgtcggggtgagctggagccacaacttggcagcccacaacagaaacccaagcgtctgcgcctggtggtagatgtgtctggtagcatgtaccgtttcaacaggatggatggccggcttgagcgcacaatggaggctgtgtgtatggtcatggaagccttcgagaactatgaggagaagttccagtatgacatcgttggacactctggagatggctacaacattggtctggttccaatgaacaaaatccccaaggacaataagcaaagactagaaattctgaagacaatgcatgcccactctcagttctgcatgagtggggaccacacgttagaagggacagaacatgccatcaaggaaattgtcaaagaagaagctgatgagtactttgtcatagtcttgagtgatgcaaatctgtcacgatatggaatacatcctgctaagtttgctcaaatcctcacaagagaccctcaagtaaatgcttttgccatttttattggctctttaggtgatcaagcaaccaggcttcagagaactttaccagctggtcggtctttcgttgccatggataccaaggatatccctcagattttacaacagatcttcacctccaccatgttgtcgagtgtctaagaagtgcccttcatcaccctgatgacaccaggatttgaaataagacaggaataaagagtattctgaaaaaaagaagatatggatgaagtgaacccatgcagtgactggatgattccggcattcctgggtcttcctacacttgctccgtaatgagaattcagagaagcagccagaaggagacttaaacatggaaagatactccactgatgagtttagaagtgattagggcaagctagttgacctgcactttatcaaaggttggggttaaaggaaggtggttttgagaactatgtgtttggtctatttccaaaaacctgagggggagaaaatactttgcttttgccttaacacatcatctggtcacgttagaaaagtgaccccatcaaactgagcctttgatgtcacattctgacacaagatgcaagtctgtgcaaaacccaccaaaatgctcctatccaacaattatttttattttctccctgctctgtattgaccagaaaacaatgattttataatatttaacccaccaaaaagtccctccaacagcaatatcttatgaaaggctggctgttctcaataatttcattttcttggccaaagccaaaaggaatcaaaaaatccttggagtgcttgcctttccacgtgacttttaaaaggctcttaaagagcaaatgtcctcttctccttgctgctagagtgggaggagaaagatgtcttgccttaaaagtttactgtttcttctgttcttctagcatctctcaaaaaattcacagtactccattttggggtccaaactgtaatgctcaaaataataaatgcttacacgaaaattatttattgagaatattcatataaaaattacctaaagcaaagtaaaaaaagtaaaatcaaggtggtatatttgaagtgaatggtgattggaaatttttagctgtaacaaaaagaaagaaaacaactttttttaaagcctcattctcttttctttcaaaatgtaccttattcccacacactcttgggctgacctttattttatcaataagctcaatattactttgtttaaaataagatgcttcagcaaaagtcattctctctttaaccatataatttaaaaactcctcttcacgattgatagcaaaatcagaaacgttagggcaccagtgagttgaaaaaactggtcttaagttggaaaaactattattaataatattatcctatccatccatatctattgaaattgtacaggtccataatttcattttaattaattataggaaagaagaaaagataatacccatttgttctatcacccctctccctatcattaactatcaaataaataaataaaagcaatctgatttccaacgtggtactaaaaaaaaaa

SEQ ID NO: 360 - DNA, 8395 bp, Homo Sapiens
ggtttgataaacgaattttctcccatctagtggagaggcatagaaagaagaaaattaatgctgggataaacagaataggagagctgatcccatgttctcctgccctgaagcagagcaagaatatgatcctggaccaagcctttaaatatataacagaattgaaaaggcaaaatgatgaactcctgcttaatggaggaaacaatgaacaagctgaagaaataaaaaagctacggaaacaactggaagaaatccaaaaagaaaatggccgatatattgaattactgaaagctaatgacatatgcttatatgatgacccgacaattcactggaaaggaaatcttaaaaactcaaaggtctctgttgttattcctagtgaccaggttcaaaaaaaaattattgtttattccaacgggaatcagcctggtggaaacagccagggaacagctgttcaggggataacttttaatgttagtcataatttacaaaagcagaccgccaatgtggtgccagtacagaggacttgcaatcttgtgactcctgtatctatttctggagtttacccttctgaaaacaagccatggcatcagaccacagttcctgcattggctaccaaccaggctgttcctctttgtcttcctgctgccatttctgctcagagtattctcgagcttcccacctctgaaagcgaatcaaatgtgcttggtgccactagtggctcactgattgctgtttcaattgaatctgagcctcaccaacatcattctttgcacacatgcctaaatgatcaaaattcttctgaaaataagaatggacaagagaaccccaaagtattgaagaaaatgaccccttgtgttacaaacatcccccacagctcctcagcaactgccactaaagtgcaccatggaaacaagtcctgcctgagcatacaggacttcggaggtgattttcaaaacacttttgttgtttcagttaccaccacagtctgctcgcagcctcccagaactgcaggtgattcttctccaatgagcattagtaagagtgcagacttgacaagtacagctacagtggtggcatcatctgcccctggagtagggaaggccaccattcctataagcactctttcgggaaaccctttggacaatggttggactctttcttgttctttgccttcttcaagtgttagtacttcagatttgaaaaacattaatagccttacacgaatctcttcagctggaaacacacagacaacgtggactactttgcaactggcaggaaacactattcagcccttaagccagacaccatcttctgctgtgactccagtattaaatgagtctggtactagccccaccacaagcaaccacagtagatatgtggctacagacatcaacttgaataattcctttccagcagatgggcagccagttgagcaagtagttgtaacattgccttcttgtccatctttacctatgcagccactaattgcccagccacaagttaaatctcagcctcccaaaaatatccttccactgaattcagcaatgcaagtgattcagatggctcagccagttgggtcagctgttaattcagctccaactaatcaaaatgttataattcttcagccacctagcaccaccccatgcccaacagtgatgagggcagaagtttccaaccaaacagtaggtcaacagatagtaatcatacaggctgctaatcagaatcctttgccactcctccctgctccacctcctggttctgttcgactccccatcaatggagccaatactgtaatagggtctaataattcagtgcaaaatgttccaacaccacagacttttggaggaaagcatcttgtccacatattaccaagaccttcatctttatcagcgtctaactcaacacaaactttttctgttaccatgtcaaaccaacagcctcaaaccatttctttaaatggacagctctttgctttgcagcctgtgatgtcttcatcaggaactacaaatcaaacccctatgcaaattattcaacccaccaccagcgaagatccaaataccaatgttgccctgaatacatttggtgctttggccagcctcaatcaaagcatatcacagatggctgggcaaagctgtgtacaattgtctattagccagcctgccaattctcaaactgctgcaaatagtcaaaccactacagctaactgtgtttcattaacaacaactgcagcacctcctgtgacaacagatagttcagccacactagctagtacttataatctagtgagtacttcctcaatgaacactgttgcttgtttgcctaacatgaaatctaaaaggttgaataagaagccaggtggcaggaaacacttagcagcaaacaagtcagcgtgtcccctgaattcagtcagagatgtgagcaagttagactgccccaacactgaaggttcagcagagccaccctgtaatgatggactgctagaaagcttccctgctgtgttaccatctgtctctgtgtctcaggcaaatagtgtgagtgttcctgcttcacattctttgggtgttctaagctctgaatcattaatacctgagtctgtatcgaaatctaagtcagcagaaaagtccagcccaccctcccaagaatctgtaacaagtgaacattttgcaatggccgcagcaaaatccaaagattctacccctaatctacaacaagagacatctcaggataaaccaccaagtagtttagcattatcagatgctgccaaaccctgcgcttcagccaatgtattgattccatctccaagtgatcctcacattttggtttctcaggttcctggtttgtcatctacaacaagcactacaagtactgactgtgtttctgaggtagaaatcattgctgaaccttgcagagttgagcaagattcatcagatacaatgcaaaccacaggtctcttaaaggggcaaggtttaactacattgctatctgatcttgctaaaaaaaaaaaccctcagaaatcatctctttctgatcagatggatcatcctgacttttcttcagaaaatcctaaaatagttgattcaagtgtgaatttacatcccaaacaggaactattactgatgaacaacgatgatagagatcctccacagcatcattcctgcctccctgatcaagaggttattaatggttctttgatcaacggtagacaggccgactctcccatgtcaaccagctctggcagtagtcgtagtttctcagttgcatccatgcttcctgaaacaacaagagaagatgtgaccagcaatgcaacaactaatacatgtgacagctgtacctttgtagagcaaactgatatagtagctcttgcagcaagagctatttttgaccaggagaaccttgagaaggggagagttggcctccaggctgatataagggaagttgcttcaaagccttctgaagcatcattgttagagggagacccacccttcaaatcacagatacctaaagagagtggcacaggacaggcagaagcaacaccaaatgaatttaattctcagggttcaattgaagcaactatggagagaccccttgagaaaccaagttgttctctaggaattaaaacatcaaatgcatctttacaggattcaacttctcagccaccaagcatcaccagtttaagtgtgaataatcttatccatcagagcagcatcagccatcctctggccagctgtgcgggtttatccccaacttcagagcaaacaactgtgcctgcaacggttaatctgaccgtttcatctagctcctatggcagtcaacctcctggaccatctctgatgactgaatattcccaagaacagctaaatactatgactagtaccataccaaattcacagattcaagagccactcttaaagccaagccatgaaagccgtaaggattctgctaagcgtgctgtccaagatgaccttttactgtcttcagctaaacgtcaaaagcactgtcagccagcccccctcaggcttgaaagtatgtccctgatgagcagaactccagacaccatttctgaccaaactcaaatgatggtcagtcagatccctcctaattcttcaaactcagttgtgcctgttagcaacccagctcatggagatggccttacacgattatttccacctagtaacaactttgtgactcctgcattgaggcaaactgaagttcagtgtggttctcagccttcagttgctgaacagcagcaaacccaggcaagtcagcatctacaggccctgcagcagcatgttccagctcaaggtgtatctcaccttcatagtaaccatctctacataaagcagcagcagcagcagcagcagcagcaacagcaacaacaacaagcagggcagttaagagagaggcatcacttatatcaaatgcagcatcatgtacctcatgcagagagctctgtccactctcagccccataatgtccaccaacagaggactctgcaacaggaagttcagatgcagaaaaagaggaatcttgttcagggcacccagacctctcagctttccttacaaccaaagcaccatggaactgaccaatcccgatccaagactggccagccacatccccaccatcagcagatgcagcaacaaatgcagcaacactttggaagctcccagacagagaagagctgtgaaaacccttcaactagtcggaaccatcataaccatccccagaaccatctcaatcaagatattatgcaccaacagcaggatgttggaagcagacagcaaggttcaggggtttcatctgaacatgtatctggccataatccaatgcagaggcttttgacatcaagaggcttagagcagcaaatggtgtcccaaccaagtattgtgactagatcttcagacatgacctgtactccacacaggccagagagaaatagagtttcaagttattctgctgaggcactcattggaaagacatcttctaattcagagcagagaatggggatatcaattcagggttccagagtttcagatcagcttgaaatgagaagctatcttgatgttcccagaaataagagtttggctattcataatatgcagggtcgtgtggaccatactgtggcctcagatatccgcctttctgattgtcagacgtttaaaccaagtggagctagtcaacagccccagagtaattttgaagtacaatcttcaagaaacaatgaaataggtaaccctgtatcatcattgcggagtatgcagtcccaggcttttcgaattagtcaaaacactggccccccaccaattgaccgtcaaaagagattatcttacccaccagttcagagcatcccaacaggaaatggtattccatcaagggacagtgaaaatacttgtcaccaaagtttcatgcagagcttacttgcccctcacctcagtgatcaggtcattgggagccagaggtcactctcagaacatcagaggaatacacagtgtggtccatcctctgcaattgaatataattgtcccccaactcatgaaaatgtccatattagaagagagagtgagagtcagaatagggaaagttgtgacatgtcgttaggtgcaattaacaccaggaacagcaccttgaatattcctttttcaagttcctcttcctcaggagatattcaaggtcgaaacacaagccccaatgtttctgtacagaaatccaatcccatgaggattactgagagtcatgccaccaagggccacatgaaccctccagtcacaaccaacatgcatggggttgcaaggccagcgttgccacatccatctgtgtctcatggaaatggcgatcaaggccctgctgtacgtcaagctaattcttcagttccccagagatcaaggcatcccctgcaagacagcagtggttccaaaattcgtcagcctgaaaggaatcgttctggaaaccaaaggcaaagtactgtctttgatccaagtcttccccatcttcctctctctactggtggcagtatgattcttggacgtcaacaacctgccacagagaagagaggaagtattgttcgtttcatgcctgatagcccacaagtacctaatgataattcaggtcctgaccagcatacactatcacaaaattttggtttttcttttattcctgagggtggcatgaatccaccaataaatgctaatgcttctttcattccacaggttactcagcctagtgccactcgaactccagccctcatcccggtagatccgcaaaatactctgccctccttctatcctccatactctcctgctcatcctacactgtccaatgatatttcaatcccctattttcctaatcagatgttctcaaatcctagcacagagaaggtaaacagtggaagtttaaataaccgatttggatcaattttatctcctcccagacctgttgggtttgctcaaccaagttttcctcttctcccagatatgccaccaatgcacatgaccaactctcacttatccaattttaatatgacatctttgtttccagaaatagccacagcgcttcctgatggctcagcaatgtcacccttgcttacaatagcaaattcctctgcctctgactcttccaagcagtcctcaaacagacctgcccataacataagccatattctaggtcatgattgcagttcagctgtttaaatactgataaacaaaatgtaaaggtaatgagtgagattacaaatgtatttgtgcgtgcatgtgcacagacatgtacatgaagagaaggattgtgtgtgtgtgtctgtataatcagttttcagttatcttctgaatgtagggaagccatgtcagatgcagatactgggttgtcagaaaacaagttatctttcgttttcaactgcatggtgtacttttttattttccaagtagatttacatttccaagttgatatttcctaaatactaattagctggaaattgggggagatcatcttgtcatgtactgggtagtaggagggagcctagactttaaacttgattgttgataacttatggaatatgtaggtaagttgctactgaaaaatataggcagcttgataaaacacagtggctcataatcaagtgctggctaatgtcagcatctagaacagcttcttacctatgacagatgttgaactgatgttgagtttaatgtccgtagttaaagtcaagcagttagcaaataaataaaagcaatcagcctttattctcaaagtttggtttagatacaggcttctttctaaattataacaatgcataaattatctgaattttatgtcttgttcttcaaattagggagctgtgttaccctttaatgtgccaagattatttaaagcaaaggtcttccttagacaattatttagccgtaaatatagaaagctaaaaagttaagtacatacatattctccgttttgtgcttgcattttgcatcaggtcataagggtaaaagcagttagttgtattgtggagttttgcatgggtgcagttaacaatggatgtttcatcagctgagtttaatttagtattctctcttcattctatttatttggtcttgaaataaattcttttgcattcatttaaatattaggattgatcaggaaatagtgtttgtaatctacacgtttatttgagccttactttaaaaatatttctgaacagagatttaagctctgtcagtattttcatttactgatagcatttatattttaaatatggcattgtatatttcattattatccttcataacagaattataatgagaatatgaatttgttatttttcttgttggtagatgtgaaatggtgcttcaaaaaatatatagtctttctgtatgtctctgtgtgtgtaagtatgtgtgtgtgtgtgtacacatattttaaagtatgaattggtcctttaaaaacaggcctgccatctgaaaatgggaaattgagacctgagacctgctaaagcatagaagaacttgatataggtagggtttttttttttttttttttttaatagatggagtctggctctgttgcccaggctggagtgcagtggcgtgatctcagctcactgcaagctccacctcccgggttcaagtgattctcctgcctcagcctcctgtgtagctgggactacaggcacgtgccaccacacctggctaatttttggtacttttagtagagacggggtttcaccgtgttagccaggatggtctttatttcctgacctcgtgatccacctgcctcggcctcccaaagtgccaggattacaggcatgagccaccgtgctggcctaggtacaggtttttaaaagccccacagaagtttataatacgtttaaaaacccatattaaaatttgaaaacttaaaaaaaaaaaaaaaaaaa

SEQ ID NO: 361 - DNA, 2117 bp, Homo Sapiens
gcgaggctgaacgcctgacgtcaaggcgacatcgccaaacctcgcccagattcaggcgtgtaaaccagccggagcggcgcggcagcggcaggaccgccgtggcgcctagagtagcgacccggggggagcgcggggcgacgctggctgcagggacccggtgacagcgtgagaggtactaggttttgacaagcttgcatcatgcgtgagtataagctagtcgttcttggctcaggaggcgttggaaagtctgctttgactgtacaatttgttcaaggaatttttgtagaaaaatacgatcctacgatagaagattcttatagaaagcaagttgaagtagatgcacaacagtgtatgcttgaaatcttggatactgcaggaacggagcaatttacagcaatgagggatttatacatgaaaaatggacaaggatttgcattagtttattccatcacagcacagtccacatttaacgatttacaagacctgagagaacagattcttcgagttaaagacactgatgatgttccaatgattcttgttggtaataagtgtgacttggaagatgaaagagttgtagggaaggaacaaggtcaaaatctagcaagacaatggaacaactgtgcattcttagaatcttctgcaaaatcaaaaataaatgttaatgagatcttttatgacctagtgcggcaaattaacagaaaaactccagtgcctgggaaggctcgcaaaaagtcatcatgtcagctgctttaatatactaaatgcattgtagctctgagccaggtctgaagaactgttgcccaattcaacagtgccagcattccaactttgttaaacctaccaacatcttaaatggactttcctgtggtggtaccctttaagaggcggatgaaagctactatatcagtttgcacattctaatcactttccagtatcacaagagagatttttacttatataatagtcctagagtttgcagctggtaaaaccagaggctacatccagtattactgctaagagacattcttcatccaccaatgttgtacatgtatgaaaatggtgtactgtatactttaacatgccccatactttgtattggagagtacaataatgtaaatcctaaaagcaccactattttagcataataaaagaaagtccaaagagctcctatatagactactccagataacttcgcttctttgatacttgtagcttattgtaattttttttaagaaattcaaggtcattattattgtacaaaataagcgctttgattaacacagctatatagtttttttaatttttaaaaaacctgtggagacggtgatcttgtctttaaaacatgatagtcctttcagtataatgtcttagattaaagacgttgcctttaatatctgttgggaaggaaatgtccagacttttcaaatctcttattatatgtttcctttttttgtttacatagggaacaatgtttatagtcgtgtgtacagtgggggtctacaacaagaagtgtatattttcaaacaattttttaatgatttaacaatttttgtaaatcattttcaggcttctgcagctgtagattctcactgtgaatcccttgcttgctcatgcataagtgtatttgcaataccaaatatacaggtttagtatttttgcctgttagtgattgtttcacatgtgtaacgttttggttgagatgttaaatggtggacgagtactgtggatgtgaatgtgggaagtaattttaatcatatgtaattggtcacaaggcctaatttgcagtaactattgctgttttatttaacaatgccttgttgctttgtatgcattaatgtttggatgtaaagattgtgtgtctatccaacagggagccacagtatttaaattgaccaacctaatgttacaactactttgaggtggccaaatgtaaactaaaagccttaattaaagtggtgcaattttgtataacttagcatcagtagttcaataaatttggattgccatgcaagggcttgcattataattacttgccacttgaatgtgttttgtgtaatgttttaacagtgctagtaaataaatacgggtttaccctggtaaaaaaaaaaaaaaaaaaa

SEQ ID NO: 362 - DNA, 2121 bp, Homo Sapiens
ccccgcgcagcccggcccgacccgcggcgatggcccagcccggggacccgcggcgcctctgcaggctggtgcaggagggccggctgcgcgccctgaaggaggagctgcaggcggccgggggctgcccggggccggccggggataccctcctgcactgcgccgcgcgccacgggcatcgggacgtgctggcctatctggccgaggcctggggcatggacatcgaggccaccaaccgagactacaagcggcctctgcacgaggcggcctccatgggccaccgagactgcgtgcgctacctgctgggccggggggcagcggtcgactgcctgaagaaggccgactggactcctctgatgatggcctgcacaaggaagaacctgggggtgatccaggagctggtggaacatggcgccaatccactcctgaagaacaaagatggctggaacagtttccacattgccagtcgagaaggcgaccctctgatcctccagtacctgctcactgtttgcccaggtgcctggaagacagagagcaaaattagaaggactcctctgcatactgcagcaatgcatggccatttggaggcagtcaaggtgcttcttaagaggtgccaatatgaaccagactacagagacaactgtggcgtcaccgccttgatggacgcaatccagtgtgggcacatcgacgtcgctaggctgctcctcgatgaacatggggcttgcctttcagcagaagacagcctgggtgcccaggctctgcacagggcagctgtcacagggcaggacgaagccatccgattcttggtctctgaacttggcgtcgatgtagatgtgagagccacatcaacccacctcacagcacttcattatgcagctaaggaaggacatacaagtacaattcagactctcttatccttgggagctgacatcaattctaaagatgaaaaaaatcgatcagccctgcatctggcctgtgcaggtcagcacttggcctgtgccaagtttctcctgcagtcgggactgaaggattctgaagacatcacgggcaccctggctcagcagctcccaaggagagcagatgtccttcagggctctggccatagcgcaatgacataaggatgtttccaagaggaggcaataaagtgcatgagttgctgggagcctgagcacctttcgtttttcggctcagagaaagccaagtgcaacttgcttcagtcatcctgaacctgagttcaaccaaccgcagccacctacgtttgaccccagcgagatcaaagttgtatatctgaggtgtaccagtggtgaagtcagtgccacatctgcactggcccccaaggtcagctccctgggtctgtctccaaaaatggttgctgatgacatcaccaaccattgactggaagagtctgaggatgatagtgaaactgaccagccacagcagacaggcccagattgaggtggtgccttctgcctctgccctgatcgtcacaaccctcaggaaccaccgacagaaagaaagaaacacaaaaacatgaaacacagtggtagcaccacttctgatgagattgtcaacattgcctaacagatgcagcagcagtctttagccagagaactctctggaaccattaaagaattcctgggggccggttgcggtggctcatgcctgtaatcccagcactttgggaggccgaggcgggaggatcatgaggtcaggagatcgagaccatcctggctaacgtggtgaaaccccgtctcttactaaaaatacaaaaaaattagccaggcatggtggtgggcgcctgtagtcccagctactcaggaggctgaggcaggagaatgctgtgaaccctggaggcagagcttgcagtgagccgaatatgcgccactgcactccagcctgggcaacagagcaagactccgtctccaaaaaaaaaagaattcctggggcctgcccagtctgtgagctgccatgttgatagtatcacagatgataccaacagtgaagctgtggaatgcccagctagttaaagaatgcaaaggaaaatattttcacaaagggttatctgataaccaaaaaataaaaagacatttcatctaagccacttaaaaaaaaaaaaaaaaaaaa

SEQ ID NO: 363 - DNA, 4336 bp, Homo Sapiens
acgtgcttaggagccatattgtcgctagtggccgctggggctgggaggggtgtgctagagaggcgcagcttctctgggcgtggtttttatcctgggggaaggatcggtggaatgtgaggggaggtggaggagatggcggcgacggcccgggaagatggcgccagcggtcaagagcgaggtcagcggggctgcgagcactatgacagaggatgtctcctaaaggcaccttgctgtgacaagctttatacttgccgcttgtgtcatgataacaatgaagatcatcaactagatcgctttaaagtgaaggaagtgcagtgcataaactgtgaaaaaattcaacatgcccaacagacttgtgaagaatgtagcacattgtttggagaatattattgcgatatatgccatttgtttgacaaagataagaagcagtatcactgtgaaaactgtggaatttgtaggattggtccaaaggaagattttttccattgtttgaaatgtaacttatgcctagctatgaatcttcaaggaagacacaagtgtattgaaaatgtgtcccgacagaattgtccaatatgtttggaggacattcacacatcccgtgttgttgctcatgtcttgccatgtggacatcttttacatagaacgtgttatgaagaaatgttgaaagaaggctacagatgtccattatgtatgcactctgctttagatatgaccaggtattggagacagctggatgatgaagtagcacagactcctatgccatcagaatatcagaacatgactgtggatattctctgcaatgactgtaatggacgatccactgttcagtttcatatattaggcatgaaatgtaagatttgtgaatcctataatactgctcaagctggaggacgtagaatttcactggatcagcaatgacgagcctacacagtactggagaacttggcattttctgatatagaaaaaggctttccttggtatcgtgttatcatgtgtcgtcatctatgcattagagttgatgtgttttgtactagtgtcacagcataaaatcatattacaagtacgtaaggattcagggtctcttgatagacttatcatagctctatattgaatgaaagccactgtgcttgtgttttgattggaaattcctttagtgtcagttttttggaagccaatgatgtttgccactgatacattcatagaagtgtattatattttcatgaagctttgctttaagtgacactacgcgtgcagttcatttctagttcttgatagaactgcacttaattttcagtagtagtcttgactttttaagggctgtgttatattaagttctcccttactgttaaaacctaattaaatatgctttagaattttctaagacagtcctctggatcctctaaatgtgaattttgatgtaataactgctaataaaattatattgaaactgttttatagaaagttttttccaaagttttctatgtttggctcaattagggcagtatcatcagttctataatgtaaaagaaattttctttcttttgaggtattccataaaagtagttgggaaaattattatgtaaaataataagactcttccaaagccttaataaaaacatcaacattgaaaacagttttttttaggttgcccaaaattatttcttcaaagagtcattcattccttcatttagcaagtatttattgagcaactgctatgtggcagatatgtttctagatgctgtagagacaacagtgaacaataaagataaaagtccttgtcctcacagcagtacattctattgttcatcatatttgatcaatgtactcatttttctttatgcaaggagtggatgtcttattgtaaatgaatagaatatttcttccctaagcgtgtgaaaataggggatggatgagtgggaagggcatgggatattcctggcaagatctctgatttcataatacttttttgggctcatgtagtggaattaaatatacctcttacttcaggaacaaagttaacaaatatgtttgatgatccagccgactttgacactgttatctccgtaatagctttaccattaggctaggatgtaaaatgtacatttatcagttgataagtacctattgagcaccagttgtatttccaactttgagctatttgaatcttctttgaataaggaagttagccttttaactagaaagcctaagagttctggcacatttatttcttcttttgttgaaatttattcacctagataaaggcagcagtttgggactcagatctttattttatcccaccttcttgtcttctgtattccactcttcttatgttctttcccttcatctgtttccttggcctggccagagcagcagtgctgatcttcatttgggaaaggatgttcctgggtattaccaattagtatacagataagtaaagactagttttccagatctaatacttttttttgaagtggttttgctctgtcatttaggctagagtgtagtgaagtgatcgtagctcactgcagccttgacttcctgggctgaactgatccttccacctcagcctcctgagtagctgggactacaggtgtgtgccaccatgcccagctaatttttaattgttttgtagaaacaaagtccaggctggtcttgaactcctgggctcaagcatttctcctacctcggccttccaagggctaggattacaggcatgagccactgtgcttggtccagatgtattactttttatgtttggtattattctgccaaaccaatcatgttattgtttttaatcattgaatcattggatctttaaataggagtgagtatataataataaggctcttctgttttcaacatctgtgctgggtcatgcattagcattaattactacaatgattctgtggggtaagtgttgtcctcatagacaagaaagctgaggtttagaggttaaaatgacacattgggggtaaataacagacactatatgttggagttgggaatcagatccaagtttgactccaaacccacttttaccacattgcttttgatctaaacttctattttgctaaaatacccctcacagctagtcatccatatcattgaagcgctcatgatttgatagattaacctttcatttttttaggtgactctagttagaaagtcttatttcacaatctgattgtttctttaacttaggatccaaacatgtccaaaataatgcagagtacatatgcaatcactcgtttatgctgtctagtcatgcacttaaagcaattttcaaatgtactcaaagtctctaggcttcggtacccagggttgcttcaagtatttgttcatgacacgtcaactcgatgattaaaatccttcaacacttctcattcacaataagaataaaatctacatcccttaccattcagtatgcaaaacttaaaatacataactttacccttaaatattttttctttctctgacttcataagtataggttatacctctataagaaagaaggtaaaaaactctcaacaatcccttctttcagagagaactactgttaacattttaacagacaacttcattcttttcctattcttttttataatgcttacaggaatgttaaatacttagacagatcttaagtacactagaattatctgtccctgaaataagttaggttgccctgccgcagaatttgtatctatagtttatttggattatttttgaaaaaagtaaaataacaatacccttacgaattttttggtgcatagcatctcagcttcttttatcattaaagatgtatgtataaaaaaaaaatgagtgtatatcaagttgttcatttcttagtttctggggtcttcttaaccagtacatagaactctttatgaattaactttagcttatgttggaagtagtagtttgtttatagtgtcatggattttaaaatcaaactcagtttttatttcttcactaaaacctattttcatatgatatacatgttaaatttcccttttattttggtcatgcatcaaaataaatttactaagtactaaagagccaacattattttataagtgcctggcaataggtattcactagttgaatagtttaatttgaaatgaattaattttaaatgggagttgttcaaaactatgccactttttcttttgtcctttgtgttattaaaatttaattgataattgtgtatattatatatatggagtacaatgtgatgttttgatatatgtttacagtgtagaatgattaaatcaatgtaataaatttattgcctcataccattttttgtggtaaaaaaaccaaaaaaaaaaaaaaaaaa

SEQ ID NO: 364 - DNA, 8448 bp, Homo Sapiens
ctcctgctccgtctaggagtcaaaatggcggcgaggggaacctggagcagtcccggagcctgagccactgacaggagaggagagggcggcggcggcggcggtgggaggaggatggccgggggtgctggcgccggtgcggacggcggtgctggtggcggcggcggcggaggcgacggcagcggtcccagcggcagcagcagcggcgggaggagcctccgggaaatggatgaaaagaggctgctggatccagggttgaaggttcataaaggcctctgggattatactctgaagaacccgcagacggaatgcctgagtgactgaagaaaatgggtgctaatgcatctaattatcctcattcatgttccccgagggtagggggaaattcacaggcccaacagacttttatagggacctcatcctattctcagcaaggctatggttgcgaatcaaagttgtatagccttgaccatggccatgagaaaccacaagacaaaaaaaagagaacctctggtcttgccaccctcaaaaagaagtttattaagcgtcggaaatctaataggtctgccgatcatgccaagcagatgcgagaactcctctctgggtgggatgttagagatgtcaatgcattagtggaggaatatgagggaacatcagcattaaaggagctttctctacaagccagtttggctagaccagaagcccggacattgcagaaagatatggctgatctttatgagtacaagtattgtactgatgtagacttaatatttcaagaaacttgttttcctgttcatcgtgccattttggcagcaaggtgtccattttttaaaacactgctttcttcctcaccagagtatggggcagagataataatggacatcaatacagctggtattgatatgcccatgttttctgctttgttacactacctttatacaggagagtttggaatggaggactcaaggtttcaaaatgtcgatatccttgttcagcttagtgaagaatttggaacaccaaattcccttgatgtagatatgcgtggactctttgattacatgtgttattatgatgtcgtccttagtttttcttcagactctgaactggttgaagcttttggtggaaatcagaactgtttagatgaagagctcaaagcccacaaggctgttatttctgcacggtccccattttttcgaaatttattacaaaggaggatacgaactggtgaagaaatcacagaccgaactttgaggactcccacaagaattatattagatgagtccattataccaaaaaaatatgcaacagtgatattacactgtatgtataccgacgtggtggacctctctgttttgcactgtagcccctctgtggggagtctcagtgaagttcaggctctcgtcgcagggaagccaaacatgaccagggcagaagaagccatggaactttaccacatagcactgttcttggaatttaacatgcttgcacaaggctgtgaggatatcattgctgagagcatctcattagataccttaattgccatcctcaagtggagttctcatccatatggctctaaatgggtgcaccgacaagctttacatttcctctgtgaggaattttcccaggtcatgacttcggatgttttttatgaactcagcaaagaccatctgcttactgctatccagtctgactacctacaggcaagtgaacaagatatccttaaatatctgattaaatggggagagcatcagttgatgaaaagaatagcagatagagagccaaacttactgagtggcactgcccatagtgtgaacaaaagaggtgtaaaaagacgggacctggacatggaagagctcagagagatcctttcttctctcttaccttttgtgcgaattgaacacatcttacctataaacagtgaagtcttaagtgatgcaatgaaaagaggcttgattagtactcctccatcagatatgcttcctacaacagaaggtgggaagtcaaatgcctggttacggcaaaaaaatgctggcatctatgttcgtcctcgactcttctctccctatgtggaagaagcaaagtcagtgctagatgagatgatggtggaacaaacggatcttgtgcgcttgcgaatggttagaatgtccaatgtgccagacacgctctacatggtcaataatgccgtgccacagtgttgtcacatgatcagccaccagcagatcagcagcaaccagtcaagccctccttcagttgtagccaacgaaattccagttcctcgtctcctcattatgaaagacatggtcagacgactgcaggaactgcggcacacggagcaggtgcagagggcctatgccctgaactgcggggaaggcgccactgtcagctatgaaattcagattcgagtgctaagagagtttggtcttgcagatgctgctgcagagctgttgcagaatcctcacaaattctttcctgatgaacgttttggggatgaaagtccactcttgacaatgagacagcctgggagatgtcgcgtaaacagtacacctcctgcagaaaccatgtttacagatctggactcttttgtggccttccatccacccttgccccctccaccacctccctaccaccccccagctaccccaatccataaccaactcaaagcaggctggaagcaaagacctcccagtcagcacccttcacgttcattttcttatccctgtaatcattcgctgttccactccagaacagctcctaaagctggccctcccccagtctacttgccgagtgtgaaagctgcaccgcctgattgtaccagcactgcaggactgggcagacagacggtggctgctgctgccgccaccaccacctcaacagcaacagcagcagcagcagcagcatctgagaagcaagtgcgaacacaacctgtgctgaatgatctgatgccagacatcgcggtgggtgtgtccacactgtcactcaaggacaggaggcttccagagcttgctgtagacacagaattaagccagtcagtttctgaagcaggaccagggcctccccagcatctgtcgtgtattccacagagacatacacacacttctcggaaaaaacacacactagagcaaaaaacagacaccagagaaaatccacaggaatatccggatttctatgacttctcaaatgctgcttgcagaccttctactcctgctctcagcagacgcaccccttccccttcgcaaggtggatattttggtcccgatctgtacagccacaataaggcatcaccaagtggcttaaagtcagcctacctacctggtcagacgtctcctaaaaaacaggaagaagctaggagagaatatccactttcccctgacgggcatctacacagacaaaagaatgagccgatacacctggatgtcgttgagcaacctccccagcggtcagactttcctttggcagccccagaaaatgctagtaccggtccagcccatgtcaggggacgaactgcagtagaaactgacttgacttttgggctgactcctaacagaccttcactttctgcatgtagctctgaagctcccgaagagagatccggtagaagactggcagacagtgagtccctgggccatggagctcagagaaatacagatttggaaagggaagattcaataagcagaggaaggaggtcaccaagcaagccggacttcctctacaaaaagtctgccctctgagagcaacctccaagtcgtctgtgcctgagatgtgaaacatcccattttatgatgtaacccaacaacttacagaccagttcatcaatgccagctgataactcggtttcacatgattttgttctagtttttgtgtatatatgtgtttattagacatggcatgctaagaaggttttgttttttttttttaatgttgcatctgtctaatttgtctttgaacaattatgtcgggaggcatttttaagaacaagcaggctggcactttttatttctctttacaaatgatggaatttttttgcacttgtacatttattttctctgtattgattttatatcagtatgttaaactttattgccacatttaaaggactgtattttcatacttttttgcattttacctttcatctaccaatccatgtgcattggattgcacactaagatgtattttcttacgaaatagttctgtgtttattttttaattatagaaattccaaagaacagcacatcagaatgctcctctcttttcagtaattgttttagttcagagatcttcccgctcagcctccataaatctaatgtcattttttttttaataagtcctaggagctgggcttcattcctccagcgggagtccagtcagggtcctgaagtttgctggttcaggaaagaacaggaaagagaaaagccttctgtgcccaggctaaagctgttacatttccacagtgtggatgcagtcagaatccctgcacattctggtcataaggattagagtcaccagatgaggctctaaacagatcgcatcccttggaattagaaagcagtggagaccgggcgcagtgactcacacctgtgatcggcacttcggaaggccgaggcgggcagatcactgaagctcaggagttcaagaccagcctgggcaacatggcgaaactccatttctataaaaaatacaaaaaaaaaaaaatctagccaggcgtggtggtgcgtgcctgtagtcccagctacttggggggctgaggtggcaggatcgcttgagcctgggaggttgagactgcagtgagccaagattgcaccactgtgctcccacctgggcaacagtgagaccctgtctcaaaaaaaaaaaaaaaggcagtggaaatagagaagtaacttaaaggtcacactgacagaatttctggttctgagcgtcaactctccagctgtgatggcggaactgactgcttgctgcctttaattgtcttgctctctatgggaaaaaaacaaaagggcttcagtctcatggatgttatttggtgtttgtaaagatacgttttcttttaaacgattttcaaaatatgtctaaattttggtgttgtgtaatgcataatgctttctcaccaacagaaaaaaggaaaaaaattgttttcagttaaacactacatgtcctacttgaactccactgggacgctggtttggcatttactaaaccactgagcacatggggtctttcaggatcctctcccttggaagggcaatgtgtgagctaaggactgttttttttcttactctccaatgtaaatatatgagtatttgagtttttaaatcacttcaacattatttgagcatttactttgtatttttacaaacacataaacacacagccgtagcacttagaagaaaagaggctttctaagcattccttcctctgcaggatatttgggatcctcttttctatgtatgtatatatataaaaaactatgaatcactcacactcactcgaaaactatgcagggctagggagcgtttatgagctaccgggtaaatgaattacatgcactttgaagtaaataggttttctattgggtgtcaacaacgctgatttctcccaaaactatagtttctcttacggtcttttcctcctttaccctgtggatatacactcaggaataatctgacattttagaaaagccgaacagtagatagtctccaagatgggaaacatgtcgtgtgtctgcacgccccggcaaactgccgccactcgttctgctgcctgactggttagctgctgtgcgggtgcgctcggtgacactggtggtggtgcacgctcccgagctcccagagttaacactaatctgcaggtcggctgtgcatcgcattcgaggctccttttttaaagagaaaagcataggcctctgttctcatttgtaagaagtttgactcataatagaagacggtgtcttttgaagcccagtctctgtctgtcttcagaaacaaaagtgaatgccgtcatgttccttgatgtgtgtttctgccacatatgtatgttgacatgttcatgtactgcgccggtactgcaagtaagactcaacagacctaatttggatggggagaaaaactctcatccctgacccttccccccccgcaaatgttagaccagagctgttgatcccacacattcatttttctgaaaattcatgaactattctctcatatccctgaaatataaaagtaagtggccactattcctaagattatttagtttataaagtttgcttttaatcatacaatagcttacctggctaaaactttgcgtataaagggaaaacttgctttaatctgtgggattgcggaccgatgcgacttgcagaaggtaaacaggcgtgggttttgtgtgcgttaggttaggtgttagtggacttttaatgtatcttgtgaagtatggttactagggtaggttcaagagctacatgcctctggcttttgaacccatctattaaatcttttttaatgctgtactaagataaatgtgaagtctgagtaaggttgctctcagaaaaaaaaaaaaagcatatatatatataaaataaaatttaggccatgggaactggcattttacttggtataggaatttaatgagaaccaaatcacaaaaataccagatctccttttgagatcgtggacaatcaggcctttggacaatcaccgcttccagtgcccgctgtgcgttgaggttagagacctaccgtttacacgctagagccgagaggacgttcaagtttcttaaagatgctgttggtcttttttcttatgttattgttttagttttgtgattttgatgaataattgaagttcagagtcacccgtggctcctaaggaaaaaacagcatcatgaaaggcaaaaagtatttgaaacgtaattgtttcaattttccacgcccgttctcacatgccccctttagctttatttctgggaacatgtcactagacctcagctagcctgacaccgcaataacccgttaggctttgaggcttttcagtgaattcttgacatttaaatcttcttatagaattctttatgaagccttaactaattcttgtttttgcttcctcagaaactttttattgcatctgccatccttcattggatttttgttttggtttgttgttgccattctagcaatgagcttagtccttgtacatctgcattaaggtgccgatgcagaaggcaaattggaaacacgcgccagcggcagtggggctcaaagccgacctccatgcatcattctctagagttgaaaggattgacatttctcagtaactacccggcaaaatatatattttcataatgttgaatttgccttttaggaaaacaatgtttcatgaaacacttgtaagatacttattttgaaattaattataaggcattcatatttttaggactgaattcaaagggaaatgcttctttgactttttttcattgttcggttgactttcagctttctggagtgacaaagcagcagtgatgggtgctattcctggttctgtggtggtttactttgtctactaagtgatttactttcaaacctcattacagataatcttactaaaagacttaacatgcacactgctaaaaggtgttttactgttttccattaacgctgttgtatgaacaatatttggtgacatgttgtctttttgtcctgtagattgtcatatctgttatgtagttatccttttggcaagtcctttgatttttttttcctctagaaaatcctcagactgtcaatcttccatattttgaatattataatgctgtggccatttctatagaaagattacttgcaagtgtgtgtcttgaaaataacctcttgtatttgtgtgtttatgtgagttctgtctaagagatcagataagctctggaagcttcatcatctgtacctacatgtaactgtatctgggttacatgggcaggcggtaccaagtcctgctcttcgatggggtggctgagagataaaggttcctgaactctccttgctgtgtatgcaccacatctgtacttcagagaggtggaaaatcatctacaacactgcgtttcttgtggttgtgctgttactggtataaagtcaagtgccttcaatgctaaaggctcagaaatttttcttaaactgatttcatgtcctatgcaagtgttttctacaacctgcataaccagtactttgtaaaacttgtttacgcttcaattgtacatagtgatttttaaagaaatatatagtatttttatttaggtacctccaaacttgaattcgtctgtgtgaagcattgtaaaacgatacatttctcttttgagtaccattacagttgtacagaggttttcactgcttctatttttctactgttactgataagcatgtaacactgactttatcctacatatagttggcatttcaaataaatggcttgtatagaa

SEQ ID NO: 365 - DNA, 1567 bp, Homo Sapiens
gaattcggcacgagggagaagccaaacgtaaagacaccaggagtttctcgggcccagctgtggctgctgccggggagccccaagccttggcggtccttgctgcgaataggagtctggtcaggcgtcaggctagtccgacgaagagtgggtgtgatcagcactggaaaagatgcctgcccctgctgccacatatgaaagagtagtttacaaaaacccttccgagtaccactacatgaaagtctgcctagaatttcaagattgtggagttggactgaatgctgcacagttcaaacagctgcttatttcggctgtgaaggacctgtttggggaggttgatgccgccttacctttggacatcctaacctatgaagagaagaccttgtcagccatcttgagaatatgtagcagtggtcttgtcaaattgtggagctctttgaccctgttaggatcctataaaggcaaaaaatgtgctttccgggtgattcaggtttctccatttcttcttgcattatctggtaatagtagggaactagtattggattgaatgaatagtcttccattttggaaacgttcatccactctcatatttattttttcggtgcctgcatgtttgaagactgaagcaggctaaaagctcttgatgaaatttgagggtgctgaagatgttcccactaatttccagccatcacctttggtggggtgggcttcggaggacagtctgtctgaacctgccagtgctgaccctgcagcactttcagcatatgcacatcaaagttggagaccgcgctgaacttaggagggccttcacacagactgatgtggctaccttctcagaattaacaggggatgttaatcctttgcatttgaatgaagactttgcaaaacacaccaagtttggaaatacaattgtacatggagttttgatcaacggacttatctcagctctcctaggaactaaaatgccagggccaggctgtgtatttctttcccaggaaattagctttccagcccctttatatattggagaagttgttttagcttctgcagaagtgaaaaagctgaagcggttcattgctattattgcagtgtcatgttctgtaatagaaagtaaaaagactgttatggaaggctgggttaaagttatggttccagaagcttccaaatcctgaaatagatgttttaaagatgcaacctcaaacaccaatgctgttgttaaagagcctatggggaattgctgctctttaccaaagaatggttgataggcccagaagcccatgttagttaggggaagggagcaggaagagggttgttcaaatgcccactttccagtttggccttatgctttatgcagacttgagtgtatgcaggatttcattatctgcctgggtttttttgtttgttttttgttttttaattcaagaagtaggctgggcccggtggctcatgcctgtaatcctggcactttgggaggctgcggcaggcggatcacttgaggtcaggagtccaagaccagcctggccaacatggtgaaaccccatctctaccaaaaaaaaaaaaaaaaaaaaaa

SEQ ID NO: 366 - DNA, 1057 bp, Homo Sapiens
gcaagtagcgccaatctaggcagcggctgtgaggaaaaaaggcatgaggggtcgtcttcggaatctgtgccacccggcactaccatttcgagggtgaagctcctcgacaccatggtggacacttttcttcagaagctggtcgccgccggcagctaccagagattcactgactgctataagtgcttctaccagttgcagcctgcgatgacacagcgaatctatgacaagtttatagctcagttgcagacatctatccgggaggaaatctctgacatcaaagaggaggggaacctagaagctgtcttgaatgccttggataaaattgtggaagaaggcaaagtccgcaaagagccagcctggcgccccagcgggatcccagagaaggatctgcacagtgttatagcaccctacttcctgcagcaacgggacaccctgcggcgccatgtgcagaaacaggaggccgagaaccagcagctggcagatgccgtcctggcagggcggaggcaggtggaggagctgcagctacaggtccaggcccagcagcaggcctggcaggctctacacagagaacagagggagctggttgctgtgctgagggagcctgagtgaggagaccgccagccccagaagcagagggcagtcaaggtcaagagcctgtggtccagcatgcctggcctgggcgggctacctctgagaacggctgaaatggtgcccagtccatcagcagtgatggaatttgctggaggactaggccagagcaagcctcactgccactgtgcctttggggcacccttggggttggacatacaccccctttagattcctctgtttcttctacctggataattcttggccatgttctctcttctctaggttcaggtcagctctgcccctccgcccccctcctgctggttccccagcccttttccctgccctggcttggagaatctgttttcaatctccactgattgcccccttgctggccaagcccaggggcctttaccatgttctctccacatccgtaaataaacttccttcactacaaaaaaaaaaaaaa

SEQ ID NO: 367 - DNA, 4740 bp, Homo Sapiens
tggcttccttgtggttcctcagtggtgcctgcaacccctggttcacctccttccaggttctggctccttccagccatggctctcagagtccttctgttaacagccttgaccttatgtcatgggttcaacttggacactgaaaacgcaatgaccttccaagagaacgcaaggggcttcgggcagagcgtggtccagcttcagggatccagggtggtggttggagccccccaggagatagtggctgccaaccaaaggggcagcctctaccagtgcgactacagcacaggctcatgcgagcccatccgcctgcaggtccccgtggaggccgtgaacatgtccctgggcctgtccctggcagccaccaccagcccccctcagctgctggcctgtggtcccaccgtgcaccagacttgcagtgagaacacgtatgtgaaagggctctgcttcctgtttggatccaacctacggcagcagccccagaagttcccagaggccctccgagggtgtcctcaagaggatagtgacattgccttcttgattgatggctctggtagcatcatcccacatgactttcggcggatgaaggagtttgtctcaactgtgatggagcaattaaaaaagtccaaaaccttgttctctttgatgcagtactctgaagaattccggattcactttaccttcaaagagttccagaacaaccctaacccaagatcactggtgaagccaataacgcagctgcttgggcggacacacacggccacgggcatccgcaaagtggtacgagagctgtttaacatcaccaacggagcccgaaagaatgcctttaagatcctagttgtcatcacggatggagaaaagtttggcgatcccttgggatatgaggatgtcatccctgaggcagacagagagggagtcattcgctacgtcattggggtgggagatgccttccgcagtgagaaatcccgccaagagcttaataccatcgcatccaagccgcctcgtgatcacgtgttccaggtgaataactttgaggctctgaagaccattcagaaccagcttcgggagaagatctttgcgatcgagggtactcagacaggaagtagcagctcctttgagcatgagatgtctcaggaaggcttcagcgctgccatcacctctaatggccccttgctgagcactgtggggagctatgactgggctggtggagtctttctatatacatcaaaggagaaaagcaccttcatcaacatgaccagagtggattcagacatgaatgatgcttacttgggttatgctgccgccatcatcttacggaaccgggtgcaaagcctggttctgggggcacctcgatatcagcacatcggcctggtagcgatgttcaggcagaacactggcatgtgggagtccaacgctaatgtcaagggcacccagatcggcgcctacttcggggcctccctctgctccgtggacgtggacagcaacggcagcaccgacctggtcctcatcggggccccccattactacgagcagacccgagggggccaggtgtccgtgtgccccttgcccagggggagggctcggtggcagtgtgatgctgttctctacggggagcagggccaaccctggggccgctttggggcagccctaacagtgctgggggacgtaaatggggacaagctgacggacgtggccattggggccccaggagaggaggacaaccggggtgctgtttacctgtttcacggaacctcaggatctggcatcagcccctcccatagccagcggatagcaggctccaagctctctcccaggctccagtattttggtcagtcactgagtgggggccaggacctcacaatggatggactggtagacctgactgtaggagcccaggggcacgtgctgctgctcaggtcccagccagtactgagagtcaaggcaatcatggagttcaatcccagggaagtggcaaggaatgtatttgagtgtaatgatcaggtggtgaaaggcaaggaagccggagaggtcagagtctgcctccatgtccagaagagcacacgggatcggctaagagaaggacagatccagagtgttgtgacttatgacctggctctggactccggccgcccacattcccgcgccgtcttcaatgagacaaagaacagcacacgcagacagacacaggtcttggggctgacccagacttgtgagaccctgaaactacagttgccgaattgcatcgaggacccagtgagccccattgtgctgcgcctgaacttctctctggtgggaacgccattgtctgctttcgggaacctccggccagtgctggcggaggatgctcagagactcttcacagccttgtttccctttgagaagaattgtggcaatgacaacatctgccaggatgacctcagcatcaccttcagtttcatgagcctggactgcctcgtggtgggtgggccccgggagttcaacgtgacagtgactgtgagaaatgatggtgaggactcctacaggacacaggtcaccttcttcttcccgcttgacctgtcctaccggaaggtgtccacactccagaaccagcgctcacagcgatcctggcgcctggcctgtgagtctgcctcctccaccgaagtgtctggggccttgaagagcaccagctgcagcataaaccaccccatcttcccggaaaactcagaggtcacctttaatatcacgtttgatgtagactctaaggcttcccttggaaacaaactgctcctcaaggccaatgtgaccagtgagaacaacatgcccagaaccaacaaaaccgaattccaactggagctgccggtgaaatatgctgtctacatggtggtcaccagccatggggtctccactaaatatctcaacttcacggcctcagagaataccagtcgggtcatgcagcatcaatatcaggtcagcaacctggggcagaggagcccccccatcagcctggtgttcttggtgcccgtccggctgaaccagactgtcatatgggaccgcccccaggtcaccttctccgagaacctctcgagtacgtgccacaccaaggagcgcttgccctctcactccgactttctggctgagcttcggaaggcccccgtggtgaactgctccatcgctgtctgccagagaatccagtgtgacatcccgttctttggcatccaggaagaattcaatgctaccctcaaaggcaacctctcgtttgactggtacatcaagacctcgcataaccacctcctgatcgtgagcacagctgagatcttgtttaacgattccgtgttcaccctgctgccgggacagggggcgtttgtgaggtcccagacggagaccaaagtggagccgttcgaggtccccaaccccctgccgctcatcgtgggcagctctgtcgggggactgctgctcctggccctcatcaccgccgcgctgtacaagctcggcttcttcaagcggcaatacaaggacatgatgagtgaagggggtcccccgggggccgaaccccagtagcggctccttcccgacagagctgcctctcggtggccagcaggactctgcccagaccacacgagcccccaggctgctggacacgtcggacagcgaagtatccccgacaggacgggcttgggcttccatttgtgtgtgtgcaagtgtgtatgtgcgtgtgtgcgagtgtgtgcaagtgtctgtgtgcaagtgtgtgcacgtgtgcgtgtgcgtgcatgtgcactcgcacgcccatgtgtgagtgtgtgcaagtatgtgagtgtgtccagtgtgtgtgcgtgtgtccatgtgtgtgcagtgtgtgcatgtgtgcgagtgtgtgcatgtgtgtgctcaggggctgtggctcacgtgtgtgactcagagtgtctctggcgtgtgggtaggtgacggcagcgtagcctctccggcagaagggaactgcctgggctcccttgtgcgtgggtaagccgctgctgggttttcctccgggagaggggacggtcaatcctgtgggtgaagagagagggaaacacagcagcatctctccactgaaagaagtgggacttcccgtcgcctgcgagcctgcggcctgctggagcctgcgcagcttggatggatactccatgagaaaagccgtgggtggaaccaggagcctcctccacaccagcgctgatgcccaataaagatgcccactgaggaatcatgaagcttcctttctggattcatttattatttcaatgtgactttaattttttggatggataagcctgtctatggtacaaaaatcacaaggcattcaagtgtacagtgaaaagtctccctttccagatattcaagtcacctccttaaaggtagtcaagattgtgttttgaggtttccttcagacagattccaggcgatgtgcaagtgtatgcacgtgtgcacacaccacacacatacacacacacaagcttttttacacaaatggtagcatactttatattggtctgtatcttgctttttttcaccaatatttctcagacatcggttcatattaagacataaattactttttcattcttttataccgctgcatagtattccattgtgtgagtgtaccataatgtatttaaccagtcttcttttgatatactattttcatctcttgttattgcatctgctgagttaataaatcaaatatatgtcaaaaaaaaaaaaaaaaaaaaaaaaaaaaaaaaaaaaaaaaat

SEQ ID NO: 368 - DNA, 2039 bp, Homo Sapiens
ggaggactcaggccccgctggccgcgggctcggtacccggtgggtcggtggagcgtctgttgggtccgggccgccggcttcgccctcgccatggcgccctggctgcagctcctgtcgctgctggggctgctcccgggcgcagtggccgcccccgcccagccccgagccgccagctttcaggcctgggggccgccgtccccggagctgctggcgcctacccgcttcgcgctggagatgttcaaccgcggccgggctgcggggacgcgggccgtgctgggccttgtgcgcggccgcgtccgccgggcgggccaagggtcgctgtactccctggaggccaccctggaggagccaccctgcaacgaccccatggtgtgccggctccccgtgtccaagaaaaccctgctctgcagcttccaagtcctggatgagctcggaagacacgtgctgctgcggaaggactgtggcccagtggacaccaaggttccaggtgctggggagcccaagtcagccttcactcagggctcagccatgatttcttctctgtcccaaaaccatccagacaacagaaacgagactttcagctcagtcatttccctgttgaatgaggatcccctgtcccaggacttgcctgtgaagatggcttcaatcttcaagaactttgtcattacctataaccggacatatgagtcaaaggaagaagcccggtggcgcctgtccgtctttgtcaataacatggtgcgagcacagaagatccaggccctggaccgtggcacagctcagtatggagtcaccaagttcagtgatctcacagaggaggagttccgcactatctacctgaatactctcctgagaaaagagcctggcaacaagatgaagcaagccaagtctgtgggtgacctcgccccacctgaatgggactggaggagtaagggggctgtcacaaaagtcaaagaccagggcatgtgtggctcctgctgggccttctcagtcacaggcaatgtggagggccagtggtttctcaaccaggggaccctgctctccctctctgaacaggagctcttggactgtgacaagatggacaaggcctgcatgggcggcttgccctccaatgcctactcggccataaagaatttgggagggctggagacagaggatgactacagctaccagggtcacatgcagtcctgcaacttctcagcagagaaggccaaggtctacatcaatgactccgtggagctgagccagaacgagcagaagctggcagcctggctggccaagagaggcccaatctccgtggccatcaatgcctttggcatgcagttttaccgccacgggatctcccgccctctccggcccctctgcagcccttggctcattgaccatgcggtgttgcttgtgggctacggcaaccgctctgacgttcccttttgggccatcaagaacagctggggcactgactggggtgagaagggttactactacttgcatcgcgggtccggggcctgtggcgtgaacaccatggccagctcggcggtggtggactgaagaggggcccccagctcgggacctggtgctgatcagagtggctgctgccccagcctgacatgtgtccaggcccctccccgggaggtacagctggcagagggaaaggcactgggtacctcagggtgagcagagggcactgggctggggcacagcccctgcttccctgcaccccattcccaccctgaagttctgcacctgcacctttgttgaattgtggtagcttaggaggatgtcggggtgaagggtggtatcttggcagttgaagctggggcaagaactctgggcttgggtaatgagcaggaagaaaattttctgatcttaagcccagctctgttctgcccccgctttcctctgtttgatactataaattttctggttcccttggatttagggatagtgtccctctccatgtccaggaaacttgtaaccacccttttctaacagcaataaagaggtgtccttgtaaaaaaaaaaaaaaaaaaaaaaaaaaaaaa

SEQ ID NO: 369 - DNA, 2895 bp, Homo Sapiens
ccctcgctgggcttggtagttggggcgcagccgcggtggctgggcgcggagtgtgcgtggcctgagccgtgcgggtgactgcttcagggcttctccgcgactggaccgggcgccgctcgaaagcacgccctccattcgcactgcttgttgggctcatcatgaagcgcttgggctccgtgcagcggaaaatgccgtgtgtgtttgtgacggaggtgaaagaggagccttcctccaaaagggagcatcagccatttaaagttttggcaactgaaactgtaagtcacaaggcattagatgcagatatatacagtgcaattccaacagaaaaagtggatggaacatgttgttatgttactacctataaagatcagccatacctttgggctcgactagatagaaaacccaacaaacaagctgaaaaaagatttaaaaattttctacattcaaaagaaaacccaaaagaatttttttggaacgttgaggaggacttcaaaccagctccggagtgctggataccagcaaaggagacagaacaaataaatgggaacccagtgcctgatgaaaatggacacattcctggttgggtaccagtagagaaaaacaacaaacagtattgctggcattcctctgtagttaattatgaatttgaaattgccctggtactaaaacatcatcctgatgattctggacttttggaaattagtgcagtgccactttcagatctcttagaacaaacactggaactcataggaacaaatatcaatggaaacccatatgggttagggagcaagaaacatccattacatcttcttataccacatggagcatttcaaataagaaatctaccttcattgaagcacaatgatctcgtgtcctggtttgaagattgcaaagagggtaaaattgaaggaatagtgtggcattgcagtgatggctgtttaataaaggtccatcgccatcatcttggcttatgctggccaattccagatacttacatgaattcaagaccagttattatcaacatgaacctgaacaaatgtgactctgcctttgatattaagtgtttgtttaatcattttttaaaaatagataatcagaaatttgttagactcaaagatataatatttgatgtataaaatgcaaataaaattagtttatcattatattctaatcttgaatattctaccatatttaaaaatatctcaaggtttctgttcattatgaaacatcaatatgttttctaccatttgtgaagaaatgaattttccagtttcaagtacctattcaaaattttattaaaaaccagcaaattaattttaatctctagccataaaaacataagtaatagtaagctcctaagcttggacaaaggctggattctcttcactataactgagtggtaatttaaagacaacaatttaatgtcactaattttcaaaattaaatagtttaagctcaatttaattttgctagatatttaacaaaacatacggctcaacctcataacctatatgtgtgtatgtctacatctgtgtatatatcataggatttgagaatcttaacacatgtataaataagtatatataaactccaattttaaatcttaaaattgctgaatttaccctcatattctttaaaaaacttaaagcattatgaatgtagagaaattcaccagagctcactgcctatttgatggctgtaacaagtcttcaagtatatacttttataataagttgaaaatttcatataattttatttattaagaattccaatctaagtataaaggtacaaggtagtgagaaggaaatactacagttcggagaactgcttatttccaagtatatttaacttataaagttaataaatagttaaatgaaacaaagtttataggtgacctttagtaaatggggaaattaacaggactttcttcttcatcttcaaactcttcagaagcagcaacagggctagttaattcaactcccaattgttctgaaagtttttttaccttctcttctaagagaatattcttcttcacttcttccttgtaattatacttaagatcttcaatttcttcaaaaaatgaaggatcaaaattttccagttcttttttcagcttctttatttcctcctaatggaaacattatctttaaaagttgcatataggaaatatacatattttacgtttgaacaaggagatttaattgtaaatatgaaagccaaagtattcctgaatggtcaaatacagcaataaaggcagaagaattaagatttttctttgttccattgtacagtgtaaataactaagttgttaactgtcaagtccagttatgtattctgtaagttgtgttctagtctttgactaaaatttatcatctcttataatgggacttaatctttctctaaaagcatataagagcttgtcaatagagcaatcaatcaaaaagattttgtgattcataacattgaagttagtctggttaagagttttggtttagacttcatttatattttccttactaatatctaatatttaatgaataatgatcaattttttataaagttattaatatgatcagggaaacctttgggacttctgacaggcatctggtgaagagacaattcaagccttagtgactatttagaatagccagtgatcactagctaattctcatatccatgcctttttgtcctgtttacagtcttaaaagaggtaaaacagcaaatatttttttaagggaactataaccttaggattcctgaaaagaatttcaaaaaaaaaataaagacactgttgccaatgtgacccaaaacttaagaacatactaatggcatatatttgttacaattaaaaaataaatttactacttaatcctaaaaaaaaaaaaaaaaaaaaaa

SEQ ID NO: 370 - DNA, 18815 bp, Homo Sapiens
agacccgcccgcccgagccggagttacaagagccgcctccgcgcacgggggcccggccactcggagctgctctgccgcggggactgcaccgcccgccctgccagacccgcccggaacggggctcgtcgccgccagtagccgcagcaccgcagccttgggcctcgcgccggctatggccgtgccctggggctgagccctcaggttgtgaccgagattcccgacgagagagactgaggggaagagaggaaggaggggcgggctcctggcaaggcattcgctcctgagcggaatcctgcaaagatggagaaggaggagacaacccgggagctgctgctgcccaactggcagggtagtggctcccacgggctgaccatcgcccagagggacgacggcgtctttgtgcaggaggtgacgcagaactcccctgcggcccgcactggggtggtcaaggagggggaccagattgtgggtgccaccatctactttgacaacctgcagtcgggtgaggtgacccagctgctgaacaccatggggcaccacacggtgggcctgaagctgcaccgcaagggggaccgctctcccgagcctggccagacctggacccgtgaagtcttcagctcctgcagctctgaagtggttctgagcggggatgatgaggagtaccagcgcatctacaccacgaagatcaagccacggctgaagtcggaagatggagtggaaggagacctcggggagacccagagccgtaccatcacagtgaccagaagggtcacggcctacactgtggatgtgactggccgggaaggagccaaggacatagacatcagtagccctgaattcaagatcaagattccaagacatgaactgactgaaatctccaatgtggatgtggagacccagtctgggaagaccgtgatcagactgccctcgggctcgggggcagcctctccgacaggctctgctgtggatatccgagcaggggccatttctgcttcaggaccagagctccaaggtgctggccactcgaagctccaggtcaccatgcctgggataaaggtgggaggctcaggtgtcaatgtcaatgcaaagggcttggacttgggtggcagaggaggggtccaagttccagcagtggacatttcatcttctcttgggggtagggcagtagaggtacagggcccatctctggagagtggtgatcatggcaaaattaaatttcccaccatgaaagtgccgaaatttggtgtctcaacagggcgtgagggccagacaccaaaggcagggctgagggtttctgcacctgaagtctctgtggggcacaagggcggcaagccaggcttgactatccaagcccctcagctggaagtcagtgtgccctctgccaatattgagggccttgaggggaagctgaagggcccccaaatcactgggccatcacttgagggtgacctaggcctgaaaggtgccaagccacaggggcacattggggtggatgcctctgctccccaaattgggggtagcatcactggccccagtgtggaagttcaggcccctgacattgatgttcaggggcctgggagcaaactgaatgtgcccaagatgaaagtccccaagttctctgtatcaggtgcaaagggagaggaaactgggattgatgtgacactgcctacaggtgaagtgactgttcctggggtctctggggatgtcagcctgcctgagattgctactggtgggctggaaggaaagatgaaaggtactaaagtgaagactcctgaaatgattattcagaaacctaaaatctccatgcaggatgtggatctgagccttgggtctcctaaactgaaaggagatattaaggtttctgctcctggggtgcaaggtgatgttaaaggccctcaagtggcacttaaaggctccagagtggacatagagacaccaaacctagagggaaccttgacaggccctaggcttggcagtccttccgggaaaaccggaacctgtaggatctctatgtcagaagtagacttaaatgtggccgcacctaaagtgaaagggggtgtagatgtcacactccccagagtagaagggaaagtcaaagtccctgaagttgatgtcagaggccccaaagtggatgtcagtgccccagatgtcgaagcgcatggcccagaatggaacctgaaaatgcccaagatgaaaatgcccacgttcagcactccaggagccaaaggggaaggtccagatgttcatatgactctacccaaaggagatatcagtatttcagggcccaaggtcaatgtggaagccccagatgtcaacttggagggtctggggggaaaacttaaaggccccgatgttaagctgcctgatatgagtgtcaagacaccaaagatctccatgcctgatgtagatttgcacgtgaaaggtacaaaggtgaagggagagtatgatgtaactgtaccaaagctggaaggagaactcaaaggcccaaaagtggacattgatgccccagatgtggatgttcatggcccagactggcacttgaagatgcccaagatgaaaatgcccaaattcagtgtgccagggttcaaagcagagggcccagaagtggatgtgaacctgcccaaggctgatgtggacatttccgggcccaagatagatgttactgctcctgatgtgagcattgaggaaccagaagggaaattgaaagggcccaagtttaagatgcctgagatgaacatcaaagtccccaagatctccatgcctgatgtggacttacatctgaaaggccctaacgtaaagggagaatatgatgtcacaatgccaaaggttgaaagtgagattaaagttcctgatgttgaacttaaaagtgccaaaatggacattgatgtcccagatgtggaggttcaaggcccagactggcacctgaagatgcccaagatgaaaatgcccaagttcagcatgcctggcttcaaagcagagggcccagaagtggatgtgaacctgcccaaggctgatgtggacatctcaggacccaaggtgggtgttgaagttccagatgtgaatattgaaggacctgaaggaaagctgaagggccccaagttcaagatgccagagatgaatatcaaggcccccaagatctccatgcctgatgtggacttgcatatgaaaggtcctaaagtaaagggagaatatgatatgacagtgccaaagctggaaggggacctgaaaggcccaaaagtagatgtcagtgccccagatgttgaaatgcagggtcctgactggaacttgaagatgccaaagattaaaatgcccaaatttagcatgcccagcctcaaaggagaggggccagaatttgatgtgaacctgtccaaagcgaatgtggacatttctgcaccaaaagtagatactaatgctccagatctgagccttgaaggacctgaagggaagttgaaaggcccgaagtttaagatgcctgagatgcacttcagagctcctaagatgtctttgccagatgttgacctggatcttaaaggacccaaaatgaaaggaaatgtagatatctctgcaccaaagatagagggtgaaatgcaggttccagatgtggacatcagaggtcccaaggtagatattaaagcaccagatgtggaaggccaaggcctggactggagcctgaaaatacccaagatgaaaatgcccaagttcagcatgcccagcctcaaaggcgagggcccagaagtggatgtgaacttgcctaaggctgacgttgttgtctcaggacccaaggtggacatcgaagccccagatgtgagcctcgaaggtccagaagggaagctgaagggtcccaagtttaagatgcctgagatgcatttcaagacccccaagatctccatgcctgatgtggacttacacttgaaaggccccaaagtcaaaggggatgtggatgtgtctgtgcccaaggtagaaggtgaaatgaaagtgccagatgttgaaatcaaaggacccaaaatggacattgatgccccagatgtggaggttcaaggcccagactggcacctgaagatgcccaagatgaaaatgcccaagtttagcatgcctggcttcaaaggagagggccgagaagtggatgtgaacctgcccaaggctgacattgatgtctcaggacccaaggtggatgttgaagtcccagatgtgagccttgagggcccggaaggaaagctgaagggccccaagtttaagatgcctgagatgcacttcaaggcccccaagatctccatgcctgatgtggacctgaatcttaaggggccaaaattgaagggagatgtggatgtgtccttgcctgaggtagaaggtgaaatgaaagtgccagatgttgacattaaagggcccaaagttgacattagtgctccagatgtggatgttcatggcccagattggcacctgaagatgcccaaggtgaaaatgcccaagttcagcatgcccggcttcaaaggagagggccctgaagtggatgtgaagctgcccaaagctgacgttgatgtctcaggacccaaaatggatgctgaagttccagatgtgaatattgaaggtccagacgcaaaactaaaaggtcccaaattcaagatgccagaaatgagtataaagcctcagaagatatccataccagatgttggtttgcatttgaaaggtcctaaaatgaaaggagattatgatgtaacagttccaaaagtagaaggagagataaaagctcctgatgttgacatcaaaggccccaaagttgatattaatgcaccagatgtggaggttcatggcccagactggcacctgaagatgcccaaggtaaaaatgcccaagttcagcatgcctggctttaaaggagagggcccagaggtggatatgaacctgcccaaggctgaccttggtgtttcaggacccaaggtggacattgatgttccagatgtgaatcttgaagctccagaggggaaactaaaaggccctaagttcaagatgccaagcatgaatatacagacgcacaaaatctctatgcctgatgttggacttaatttgaaagcccctaaactgaaaactgatgtagatgtttcccttcccaaagtggaaggagacttgaagggtcctgaaattgatgtgaaagcccctaagatggatgtgaatgttggtgatattgatattgaaggtccagaagggaagttgaagggccccaagtttaagatgcctgagatgcatttcaaggcccccaagatctccatgcccgatgtggacttacacttgaaaggccccaaagtcaaaggggatatggatgtgtctgtgcccaaggtagaaggtgaaatgaaagtgccagatgttgacattaaagggcccaaagtggacattgatgccccagatgtggaggttcacgacccagattggcacctgaaaatgcccaagatgaaaatgcccaagttcagtatgcctggcttcaaagcagagggccctgaagtggatgtgaatctgccaaaggctgacattgatgtgtctggacccagtgtggacactgatgctcctgatttggatattgagggaccagaaggaaagttgaaaggctccaaatttaagatgcccaagttgaatataaaagctcccaaggtctccatgccagatgtggacttgaatttgaagggacccaaactgaagggagagatagatgcttctgtgccagaactggaaggtgatctcagagggccgcaagttgatgtcaaaggtccttttgtggaagcggaggtgcccgatgttgatctggagtgtcctgatgcaaagttgaaagggcccaagtttaagatgcctgagatgcacttcaaggcccccaagatctccatgcctgatgtggacttacacctgaaaggccccaaagtcaaaggggatgcggatgtgtcggtgccaaaattggagggagatttaacaggccccagtgtgggtgtggaggtgcctgatgttgagctggagtgtcctgatgcaaagttgaaaggccctaaatttaagatgccagacatgcacttcaaggcccccaagatctccatgcctgatgtggacttacacttgaaaggccccaaagtcaaaggggatgtggatgtgtcggtgccaaaattggagggagatttaacaggtcccagtgtgggtgtggaggtgcctgatgttgagctggagtgtcctgatgcaaagttgaaagggcccaagtttaagatgcctgagatgcacttcaagacccccaagatctccatgcctgatgtggacttacacctgaaaggccccaaagtcaaaggggatatggatgtgtctgtgcccaaggtagaaggtgaaatgaaagtgccagatgttgacatcaaaggacccaaaatggacattgatgccccagatgtggatgttcatggcccagactggcacctgaagatgcccaagatgaaaatgcccaagttcagcatgcctggcttcaaagcagagggcccagaagtggatgtgaacttgcccaaggctgatgttgttgtctcaggacccaaggtggatgttgaagtcccagatgtgagccttgaaggtccagaagggaagctgaagggccccaagcttaagatgcctgagatgcacttcaaggcccccaagatctccatgcctgatgtggacttacacttgaaaggccccaaagtcaaaggggatgtggatgtgtctttgccaaaattggagggagatttaacaggccccagtgtggatgtggaggtgcctgatgttgagctggagtgtcctgatgcaaagttgaaagggcccaagtttaagatgcctgagatgcacttcaagacccccaagatctccatgcctgatgtgaacttaaacttgaaaggccccaaagtcaaaggggatatggatgtgtctgttcccaaggtagaaggtgaaatgaaagtgccagatgttgacatcagagggcccaaagtggacattgatgccccagatgtggatgttcatggcccagactggcacctgaagatgcctaagatgaaaatgcccaagttcagcatgcctggcttcaaaggagagggcccagaagtggatgtgaacttgcccaaggctgacgttgatgtctcaggacccaaggtggatgttgaagtcccagatgtgagccttgaaggtccagaagggaagctgaagggccccaagtttaagatgcctgagatgcacttcaagacccccaagatctccatgcctgatgttgatttcaatttaaagggacccaaaatcaaaggagatgttgatgtttctgccccaaagctggagggagagttaaaaggtccagaattggatgtcaaaggtcccaaattagatgctgacatgccagaagtagctgtggaaggcccaaatggcaagtggaaaactcctaagttcaagatgccagatatgcactttaaagctcccaaaatctctatgccagacctcgatctacacttgaagagccccaaggcaaaaggagaggtggatgtagatgttcccaaattggaaggggaccttaaagggccacatgtggatgtcagtgggccagacattgacattgagggaccagagggcaaattgaaaggccctaagttcaagatgcctgatatgcatttcaaagcccccaatatttctatgcctgatgttgatctaaatctcaaaggacccaaaatcaagggggatgtggatgtgtctgtgcctgaggtagaaggtaaacttgaagtaccagatatgaacatcaggggccccaaagttgatgtaaatgcccccgatgtccaagctccagactggcacctgaagatgcccaagatgaaaatgcccaagttcagcatgcctggcttcaaagcagagggccctgaagtagacgtcaacttgcctaaggctgacgttgacatctcaggacccaaggtggacattgaaggccctgatgttaatattgaaggaccagagggaaagttgaaagggcctaagttaaagatgccagagatgaacatcaaagcccccaagatctccatgcctgactttgatttgcatctgaaaggtcccaaggtgaagggcgatgtggatgtttctctgcccaaagtggaaggtgacctcaagggccccgaagttgacatcaaggggcccaaagtggatattaatgccccagatgtgggtgttcaaggcccagactggcacctgaagatgcccaaggtgaaaatgccaaagttcagcatgcctggcttcaaaggagagggcccagatggggatgtgaagctgcccaaggctgacattgatgtctcaggacccaaagtggacattgaaggccctgatgttaacattgaaggaccagagggaaagttgaaagggcctaagttcaagatgccagagatgaatatcaaagcccccaagatctccatgcctgatattgacttaaacctgaaaggacccaaagtgaagggtgatgtggatgtttcccttcctaaagtggaaggtgacctcaagggcccagaagttgacatcaagggcccaaaagtggacattgacgcacctgatgttgatgttcatggcccagactggcacctaaagatgcccaagataaaaatgcccaagatcagcatgcctggcttcaaaggagaaggtccagatgtggacgtgaacctgcccaaggctgacattgatgtctcaggaccgaaagtggatgttgaatgtcccgatgtgaatatcgaaggacctgaaggaaagtggaaaagtccaaagtttaagatgccagagatgcattttaagactccaaagatatccatgccagatattgacctgaatctcacaggtccaaaaataaaaggagatgtggatgttacaggccctaaggtagagggagatctgaaaggtcctgaagttgacctcaaaggccccaaagtggacattgatgtcccagatgttaatgttcagggtccagactggcacctgaagatgcccaagatgaaaatgcccaagttcagcatgcctggcttcaaagcagagggccctgaagtggatgtgaacctgcccaaggctgacgttgatgtctcaggccccaaagtggacgttgaaggccctgatgttaacattgaaggaccagagggaaagttgaaagggcccaagttcaagatgccagagatgaatatcaaagcccccaagatccccatgcctgactttgatttgcatctgaaaggtcccaaggtgaagggcgatgtggatatttctctgcccaaagtggaaggtgacctcaagggccctgaagttgacatcaggggtccccaagtggacattgatgtcccggatgtgggcgttcaaggcccagactggcacctaaaaatgcccaaagtgaaaatgcccaaattcagcatgcctggcttcaaaggagagggcccagatgtggatgtgaacctgcccaaggctgaccttgatgtctcaggacccaaggtggacattgatgttccagatgtgaatatcgaaggcccagagggaaagttgaaaggtcccaaattcaaaatgcctgagatgaacatcaaagcccccaagatctccatgcctgacattgatcttaacctgaaaggtcccaaagtgaagggtgacatggatgtgtctctgccaaaagtggaaggtgacatgaaagttcctgacgtggatattaaaggccccaaagtggatattaatgccccagatgtggatgttcaaggcccagactggcacctgaagatgcctaaaataaaaatgcccaagatcagcatgcctggcttcaaaggagaaggtccagaagtggacgtgaacctgcccaaggctgaccttgacgtctcaggacccaaggtggacgttgatgttccagatgtgaatattgaaggtccagatgcgaaactgaagggccctaaattcaagatgccagagatgaacatcaaagctcctaaaatatcaatgcctgatttggacctcaatcttaaaggccctaaaatgaaaggagaggtggatgtttcacttgcaaatgtagaaggtgatttgaaaggacctgctcttgacataaaaggcccaaagatagatgtagatgctccagatattgacattcatggcccagatgccaaattaaaaggtccaaaactgaagatgcctgacatgcatgtaaacatgcccaagatctccatgccagaaattgacttgaatttgaaaggctcaaagcttaagggagatgttgatgtctctgggcccaagttggaaggtgacattaaagctcccagtttggatataaagggcccagaagtggacgtttccggtcctaagcttaatatcgaaggcaagtcaaagaaatctcgttttaagcttcccaaatttaatttttcgggctctaaagttcagacacctgaagtggatgtcaaaggtaaaaagccagatattgacataacaggtccaaaagttgatattaatgctcctgatgtcgaggtccaaggaaaagtgaaaggatccaagtttaaaatgcctttcctgagtatttcatctcccaaagtttctatgcctgacgtggagctaaatttgaaaagtcccaaagtcaaaggagacttagatattgcaggtcccaatttagaaggtgactttaaaggccccaaagtggatattaaggcaccagaagtcaatcttaatgcacctgatgtggatgttcatggtccagactggaatctgaaaatgcccaagatgaaaatgcccaaattcagtgtgtctggcttaaaagcagaagggccagatgtagctgtggatctaccaaaaggagacatcaacatagagggcccaagtatgaacattgagggcccagatctcaatgtggaaggtccggagggaggcttgaaaggtcccaaattcaagatgcctgacatgaatatcaaagctcccaagatctccatgcctgacattgacttaaacttgaaaggccccaaggtgaaaggtgatgtggatatttctcttcccaaacttgaaggggatctgaaagggccagaggttgatatcaaaggccctaaagtggacatcaatgccccagatgtggatgttcatggtccagactggcatctgaagatgcccaaagtgaaaatgcccaagttcagcatgcctggcttcaaaggagaaggccctgaagtcgatgttaccctccctaaagctgacattgacatttctggtcccaatgtagacgttgatgttccagacgtgaatattgaaggtccagatgcaaagctgaagggccccaagttcaagatgcctgagatgaacatcaaagcccccaagatctccatgcctgactttgacctgaacttgaagggacccaaaatgaagggtgatgtggttgtgtctttgcccaaagtggaaggtgatctaaaaggccctgaggtggacatcaagggccccaaagtggacattgacactcctgacattaacatcgaaggctcagagggtaaattcaagggacccaaatttaagataccagagatgcacctgaaggctcccaaaatatcgatgcctgacattgatttaaacctgaagggccccaaagtcaagggcgatgtggatgtttctctgcccaaaatggaaggtgacctcaagggtcctgaagttgacatcaagggccccaaagtggacattaatgctccagatgttgatgttcaaggcccagactggcacctgaagatgcccaaggtgaaaatgcccaagttcagcatgcctggcttcaaaggagagggcccagatgtggatgtgaacctgcccaaggctgaccttgatgtctcaggacccaaggtggacattgatgttccagatgtgaatatcgaaggcccagagggaaagttgaaaggtcccaaattcaagatgcctgagatgaacatcaaagcccccaagatctccatgcctgacattgatcttaacctgaaaggacccaaagtgaagggtgatatggatgtgtctctgccaaaagtggaaggtgacatgcaagttcctgacttggatattaaaggccccaaagtggatattaatgccccagatgtggatgttcgaggcccagactggcacctgaagatgcctaagataaaaatgcccaagatcagcatgcctggcttcaaaggagaaggtccagaagtggatgtgaacctgcccaaggctgaccttgacgtctcaggacccaaggtggacgttgatgttccagatgtgaatattgaaggtccagatgcgaaactgaagggccctaaattcaagatgccagagatgaacatcaaagcccccaagatctccatgcctgactttgatttgcatctgaaaggccctaaggtgaaaggagatgtggatgtttctctgcctaagatggaaggtgatctaaaggcccctgaagttgacatcaagggccccaaagtggacattgatgccccagatgtggatgttcatggcccagactggcacctgaagatgcccaaggtgaaaatgcccaaattcagcatgccaggatttaaaggagagggcccagaagtggatgttaatttgcccaaagctgacattgatgtctcaggacccaaagtggacattgacactcctgatattgatattcatggtccagaagggaaactgaagggccccaaatttaaaatgcctgacctgcacctcaaggcaccgaagatctctatgcctgaagttgacctgaatctgaaaggtccaaagatgaagggcgacgtggacgtttctctgcccaaagtggaaggcgacctcaagggccctgaagttgacatcaagggccccaaagtggacattgatgtcccagatgtggacgttcaaggcccagactggcacttaaaaatgcccaaagtgaaaatgcccaagttcagcatgcctggcttcaaaggagagggcccagatgtggatgtgaacctgcccaaggctgaccttgacgtctcaggacccaaggtggacattgatgttcctgatgtgaatatcgaaggtccagatgcgaaactaaagggccctaaattcaagatgcctgagatgaacatcaaagcccccaagatctccatgcctgactttgatttgcatctgaaaggtcccaaggtgaagggtgatgtggatgtttcccttcctaaagtggaaggtgacctcaagggcccagaagttgacatcaagggccccaaagtggacatcgatgcccctgatgtagatgttcatggcccagactggcacctgaagatgcccaaggtgaaaatgcccaaattcagcatgccaggattcaaaggagagggcccagatgtggatgttacccttcctaaggctgacattgagatttctggccccaaagtggacattgatgcccctgatgtcagtatcgaaggtccagatgcaaaactcaagggtccaaagttcaagatgccagagatgaacatcaaggcccccaaaatctccatgcctgacattgactttaacttgaagggtcccaaagtgaaaggtgatgtggatgtctctctgcccaaagtggaaggtgatctcaagggccctgaaattgacataaaaggccccagtttggacattgacacacctgatgtcaatattgaaggtccggaaggaaaattgaaggggcccaaatttaagatgcctgagatgaacatcaaagctcccaaaatctctatgcctgactttgatttgcacctgaaaggtcccaaggtgaagggtgatgtggatgtttcactacctaaggtggaaagtgatctgaaagggccagaggtagacattgaaggtcctgaagggaagctcaaaggtcccaagtttaagatgcctgatgtacatttcaaaagcccacaaatctccatgagtgacattgatttgaatttgaaaggacctaagataaaaggagatatggacatttccgttcctaaactggagggagatctgaaaggtcccaaagtggatgtcaaaggccctaaagtgggcattgacactcctgatattgacattcatggtccagaagggaaactgaagggccccaaatttaaaatgcctgacttacacctcaaggcaccgaagatctctatgcctgaagttgacctgaatctgaaaggtccaaaggtgaagggcgacatggacatttctctgcccaaagtggaaggcgacctcaagggccccgaagttgacatcagggaccccaaagtggacattgatgtcccagatgtggacgttcaaggcccagactggcacctaaaaatgcccaaagtgaaaatgcccaagttcagcatgcctggcttcaaaggagagggcccagatgtggatgtgaacctgcccaaggctgacattgatgtctcaggacccaaagtggacgttgatgttcctgatgtgaatatcgaaggtccagatgcgaaactaaagggccccaagttcaagatgcctgagatgagcatcaaagcccccaagatctccatgcctgatattgacttaaacctgaaaggacccaaagtgaagggcgatgtggatgttacccttcctaaagtggaaggtgacctcaagggcccagaagctgacatcaagggcccaaaagtggacatcaacacccctgatgtggatgttcatggcccagactggcacctgaagatgcccaaggtgaaaatgcccaaattcagcatgcctggcttcaaaggagaaggtccagatgtggatgtgagcctgcccaaggccgacatcgatgtctcgggacccaaggtggacgttgatattccagatgtgaatatcgaaggtccagacgcaaaactgaagggccccaagttcaagatgcctgaaataaatatcaaagctcccaagatctccatacctgatgttgacctggatttgaaaggacccaaagtaaaaggagattttgatgtgtctgtccctaaggttgaagggactttgaaaggcccagaagtagatcttaaaggtccacgtctggatttcgaaggccctgatgccaaactcagtggcccatctttgaagatgccatcgctggagatatctgctcctaaagtaactgctcctgatgttgatttgcatctcaaggcaccaaaaattggattttcaggtccgaagttagaaggtggtgaagtggacctcaagggacccaaagttgaagctccaagcttagatgtacacatggacagcccagatattaacatcgaagggccagatgttaaaatccccaaatttaagaaacccaagtttggatttggggcaaaaagccccaaagctgacatcaagtcaccttcactggatgtcactgttcctgaggcagagctgaaccttgagactcctgaaattagtgttggtggcaagggcaagaaaagtaagtttaaaatgcctaaaattcatatgagtggtcctaagattaaggccaaaaaacagggatttgacctgaatgttcctgggggtgaaattgatgccagcctcaaggctccggatgtagatgtcaacatcgcagggccggatgctgcactcaaagtcgacgtgaaatcgcccaaaaccaagaaaacgatgtttggaaaaatgtacttcccagatgtagagtttgacattaaatcacctaaatttaaagctgaggcccctctccctagccccaaactggagggtgaactccaggcacctgatctggaactttctttgccagcgattcacgtcgaaggtcttgacatcaaggcgaaggctcccaaggtcaagatgccagatgtggacatctcagtgccaaaaatagagggtgacctgaaaggccccaaagtgcaggcaaacttgggtgcacctgacatcaacatcgaaggcctagatgctaaagtcaaaacaccgtccttcggcatttctgcccctcaagtctccatccctgatgtgaatgtaaacttgaaaggaccaaagataaagggtgatgtccccagcgtgggactggaaggaccagatgtagatctgcaaggtccagaagcaaaaattaagttccccaagttttccatgcccaagatcggcatcccaggtgtgaaaatggagggtgggggagccgaggtccatgcccagctaccctctcttgaaggagacttgagaggaccagatgttaagctcgaagggcccgatgtttctctaaaggggccaggagtagacttgccttcagtgaacctctctatgccaaaagtctctgggcctgaccttgatctgaacttgaaaggaccaagtttgaagggagacctggatgcatctgttcccagcatgaaggtgcatgctccagggctcaacctcagtggtgtcggtggcaaaatgcaggtgggaggagacggtgtgaaagtgccagggatcgatgccacaacaaagcttaacgttggggcaccagatgtgacactgaggggaccaagcctgcagggagatctggctgtctctggtgacatcaaatgccctaaagtatccgtaggagctcctgatctaagcttggaggcatccgaaggcagcattaaacttcccaaaatgaagctgccccaatttggcatctctactccggggtccgacttgcacgtcaatgccaaggggccacaggtttctggcgaactgaaggggccaggtgtggatgtgaacctgaaagggcctcggatttcagcaccgaatgtggactttaacttggaaggaccaaaagtgaaagggagccttggggccactggtgagatcaaaggccccactgtcggaggaggtcttccaggcattggtgttcaaggcctagaaggaaacctccagatgcctggaattaagtcctctggatgtgatgtgaacctgccaggcgtgaatgtgaaactcccaactgggcagatttctgggcctgaaatcaaaggtggtctgaaaggttcagaagtaggtttccatggggctgctcctgatatcagtgtgaaggggcctgcctttaatatggcatctcctgagtcagattttggcatcaacttgaagggcccaaaaatcaaaggaggtgcggatgtttcagggggtgtcagtgccccagacatcagccttggtgaagggcatttgagtgttaaaggttccgggggtgagtggaagggaccccaagtctcctctgctctcaacttggacacatctaagtttgctgggggccttcatttctcaggaccaaaggtggaaggaggtgtgaaaggaggtcagattggactccaggctcctgggctgagtgtgtctgggcctcaaggtcacttggaaagtggatctggaaaagtaacattccctaaaatgaagatccccaaatttaccttctctggccgtgagctggttggcagagaaatgggggtggatgttcacttccctaaagcagaggccagcatccaagctggtgctggagacggcgagtgggaagagtctgaagtcaaactgaaaaagtccaagatcaaaatgcccaagtttaatttttccaaacctaaagggaaaggtggtgtcactggctcaccagaagcatcaatttctgggtccaaaggtgacctgaaaagttcaaaggccagcctgggctctctggaaggagaggcagaggccgaagcctcttcaccgaaaggcaaattctccttatttaaaagtaagaagccacggcaccgctcaaattcattcagtgatgaaagagagttctctggaccttccaccccgacggggacgctggagtttgaaggtggggaagtgtctctggaaggtgggaaagttaaagggaaacacgggaagctgaaattcggtacctttggtggattggggtcaaagagcaaaggtcattatgaggtgactgggagcgatgatgagacaggcaagttacaggggagtggggtgtccctggcctctaagaagtcccgactgtcctcctcttctagcaatgacagtgggaataaggttggcatccagcttcccgaggtggagctgtcagtttccacaaagaaagagtagcaggcctttgtatgtgtgtacatatatatatatataacaaaacatcagccttgggtggtgtgttcctatataaactccaaagggaaacacaccgactgcctcagcaatcatgcaaagaccttgcctggcccggtggcaagcgctgaaaaaccgaccgcctgtaggctcctggaactatacagataggtaaagagttccaagttcgtccagcccatgtgcaaagtcaacagtatttgccttaagatttcatatatatatatttttttgcattgactgctgagagctcctgtttactaagcaagcttttgtgtttattatcctcatttttactgaacattgttagttttggggtaatggaaacccactttttcattgtaatgactttgggggcttttgttagtaagggtgggtggggtgatgggttgcagacggaggtcaggtcttcctctttcctgagactggatctgttcaaacagcaaacgcccacagatggcccagaggtggtggtagtcagggtgtgtgggtgtttttagggttctttagtgttgtttctttcacccaggggtggtggtcccagccagtttggtgctgacggtgagaggaaattagaatctgtttgcaaattgtccaacccaccccctcaacatgaggggcttccattttctgtgttttgtaagggaactgtttccttcatgccgccatgttcctgatattagttctgatttctttttaacaaatgttatcatgattaagaaaatttccagcactttaatggccaattaactgagaatgtaagaaaattgatgctgtacaaggcaaataaagctgtttattaaccttga

SEQ ID NO: 371 - DNA, 7185 bp, Homo Sapiens
agttgtacgttcgaaacctgtcgccgtcacttgcgcgtttggcattatccattgtcaccgcggaggaacgagcgctcgagatatcatcagtgcccgcaaatctccgcgccaaggcgctgagctactcctttccgaggtgcgcctctggtcctccgtccctggtgcccagcagcggcgaggcggcatctccgctcccgccgccgtgtccaccgagccctgggatcagggtggcagttctcaacgatgggcaggagggacctcggcggcgacccctaaaacaataccatgccccgggatccccgctgctgccgcgccagcgtcttccctttccacctccctgaccctgtcggattcggatgagcccattgcaaggagaagacgcagccgtcagattgcagattgagcttaaccaagaagttcgtaggctaatcaaggctggcttgacctacaaaagaagaagagagttctgcctgcccacttgggcttgtgttgacacggctgataacttgccatcacctgttgccagtgtggaaaaattctccctgttgaattttttgcacatggaggacagcagcaaagagggcaacacaggctgataagaccagagacagcagggagattattttaccatacgccctcaggacgttccctctagctggagttctggacttcaacagaaccccatccagtcattttgattttgctgtttattttttttttctttttctttttcccaccacattgtattttatttccgtacttcagaaatgggcctacagaccacaaagtggcccagccatggggcttttttcctgaagtcttggcttatcatttccctggggctctactcacaggtgtccaaactcctggcctgccctagtgtgtgccgctgcgacaggaactttgtctactgtaatgagcgaagcttgacctcagtgcctcttgggatcccggagggcgtaaccgtactctacctccacaacaaccaaattaataatgctggatttcctgcagaactgcacaatgtacagtcggtgcacacggtctacctgtatggcaaccaactggacgaattccccatgaaccttcccaagaatgtcagagttctccatttgcaggaaaacaatattcagaccatttcacgggctgctcttgcccagctcttgaagcttgaagagctgcacctggatgacaactccatatccacagtgggggtggaagacggggccttccgggaggctattagcctcaaattgttgtttttgtctaagaatcacctgagcagtgtgcctgttgggcttcctgtggacttgcaagagctgagagtggatgaaaatcgaattgctgtcatatccgacatggccttccagaatctcacgagcttggagcgtcttattgtggacgggaacctcctgaccaacaagggtatcgccgagggcaccttcagccatctcaccaagctcaaggaattttcaattgtacgtaattcgctgtcccaccctcctcccgatctcccaggtacgcatctgatcaggctctatttgcaggacaaccagataaaccacattcctttgacagccttctcaaatctgcgtaagctggaacggctggatatatccaacaaccaactgcggatgctgactcaaggggtttttgataatctctccaacctgaagcagctcactgctcggaataacccttggttttgtgactgcagtattaaatgggtcacagaatggctcaaatatatcccttcatctctcaacgtgcggggtttcatgtgccaaggtcctgaacaagtccgggggatggccgtcagggaattaaatatgaatcttttgtcctgtcccaccacgacccccggcctgcctctcttcaccccagccccaagtacagcttctccgaccactcagcctcccaccctctctattccaaaccctagcagaagctacacgcctccaactcctaccacatcgaaacttcccacgattcctgactgggatggcagagaaagagtgaccccacctatttctgaacggatccagctctctatccattttgtgaatgatacttccattcaagtcagctggctctctctcttcaccgtgatggcatacaaactcacatgggtgaaaatgggccacagtttagtagggggcatcgttcaggagcgcatagtcagcggtgagaagcaacacctgagcctggttaacttagagccccgatccacctatcggatttgtttagtgccactggatgcttttaactaccgcgcggtagaagacaccatttgttcagaggccaccacccatgcctcctatctgaacaacggcagcaacacagcgtccagccatgagcagacgacgtcccacagcatgggctccccctttctgctggcgggcttgatcgggggcgcggtgatatttgtgctggtggtcttgctcagcgtcttttgctggcatatgcacaaaaaggggcgctacacctcccagaagtggaaatacaaccggggccggcggaaagatgattattgcgaggcaggcaccaagaaggacaactccatcctggagatgacagaaaccagttttcagatcgtctccttaaataacgatcaactccttaaaggagatttcagactgcagcccatttacaccccaaatgggggcattaattacacagactgccatatccccaacaacatgcgatactgcaacagcagcgtgccagacctggagcactgccatacgtgacagccagaggcccagcgttatcaaggcggacaattagactcttgagaacacactcgtgtgtgcacataaagacacgcagattacatttgataaatgttacacagatgcatttgtgcatttgaatactctgtaatttatacggtgtactatataatgggatttaaaaaaagtgctatcttttctatttcaagttaattacaaacagttttgtaactctttgctttttaaatcttaaaaaaaaaaaagttgctgaagtactgtacagggttgtacaatgagaacccaatgccaaggcaaaaagaacgagtgatttttccttaggatacacatcaaccactttgctgttgaagctgtcagaataaattcctggtggtcagatgaaagggcagattaaatggactcatcagggtaagaggaataatatgggtaaaacaagaaatggcccgatagtttcacactattcctatacctccaggtccggaagacaggtaaaaaattctataatgtaagaatggaggtagttaccctgatttgaccctgtgtgggaaatgctgaaagcaccaggaggaagccggttcccgtgagataagttaacccggcctgacagaatcaagaaaattgagatgagatttgaaaggacccgaaaatgcaggggttggctttctgactgggaacttaaaaatcactcttcatgcttccctggtcctatgtgataacagagttagagacttgagtctgatttcagtcatcttcagggaccagtctgatgttgtagcaagaagactccctttaaaagtgttactgttcaaatcatatatcaggttgaatcacattcaacagagatatattctagaatacttttttagaagaggctaataaagggaagaattatattgaatggaattatttttgataatgagaattatttgggtagattcactgaggctatgtcaacatgatatttagaccaacaggtgatcaatgtttggaaaatacaacaatgacttatttaaaaattacccttcctgctatttagacaaaaacaactgatcagtggttctgttatgtcagctgactttgttagtatcatgttgaaatagcttgaagtaatatcttttatccccttgcaaattcttgtcttccaatcatctcccatatattttcataattagttgtttatgacacctttgtttttctccctctgttcagtatttcaaggaaaattatggatgccagtcttggctgcacaagatatccattacgtacttatacattttaaaatgagtactaattttcactgctaataattctgtaaggacacatcaaagctggccaaaataatgaattttttttaaaaagcaatacctggtttccaccttggactgactttgatcctgttccacttttgaaattttatttgttccttttccatcgtggatgttcctctactttggcaattgtggagggctaatcaatcttatgttagcaggacaacccatgaaaaacaagtcagagagtgaaggctttttcccctaatcctggcagagcagggcgtagaaaagagaggatgtccgtgcttaattctagatacttttgagacaacaccttcagaaaacacataatttaatctttgccatccttagatagagaagggctatagatcacatacgttatcaaaaactactcccttggaaaaaatatctttcgaaaatcaaatttaaacatttcactctgtgctgcatatttcttttaccattgaccattattatagggacccatgaagtaaatgtcacaatcatcttactagctctctctctctcagcaaaataaaactgtgatgtgtcttctttgtaaaagtttaggtataaaatgctatgcaactttttctttatagtaagagctttattttctttaataatatagcccaacttatatgttttaatctcccttgtccctcagaataagcagaaaatataactgcagctgtatgtcgtagacacaagaattgaaactgtgcagtcagtagagctgaacttagctatgaattaatttaaattaattctaaagtgactctggtttccattttagtctattagctagagggttttggctgttgctttttttaaagttaggtccacacagtgaagggaaaagagtctgtgaaggtgatcagtgtagcagtaagacatctaaaatcaagacaatgacatgggggctttgtgtacttagctggataattcccttctactgtcctcttccccttggctgtgtagataaaattgtgcattcaaatgatggtactttgacttttgagggtttttatttctgttattcacaaaatactcattctcatttatgtatattgtatgtttaacccccagtgggatttctggctgctgaaaccactttgggccaggaagaacaaggatgaagaggttcctgtcatttcttatggggttcacagaattatttggggcttaaatggtacaatggagacagtcatgtgcaatgcttaagatggtctgacagggtcccttttgctggaggtgttcctgaagagattgaacctagtaacaggctttattttcaccttgtgtacaacatggcaaagactgctaagattaaaatccgtctcccatttgttacagcctcacctgcaccaggatagaaagcacgtgatggaatctgtgatgtctaatgtgtcttatgaaaattgccaaacaactgtccctggggattctgctttgattggcatttttagtcatgggaatgtatatttgctgatatatctgctctgtgtttgggcctctcttgctgtcattatgatgtattttgagatgattagtcaagagtcaaggttgcgagtacaggccaagaccatgggaaaaaaagccatgctcactggccaataaagagcttgatgctgcctggccaaatgaggtgactcagatagaatctgatcccattcagagcttggtaaatgtcactgtacagaagacattgaaaaggaagaggcatagtcatgatcaaaaggatatattgacagttatctatagccagggtagttgttaatacctgcttgtttggggagatatgtttgattatagagagactctgggccaccctcaaacaccgtcagatgcattagcagcccactgcatgggacaatcgcaggcagatacgaggaatgtatcccctgcctattttccttgtgtaacaaatggaaaacattctcccctgtgagaaataatgcaatttctaattatctggatgttcgttgaaaatatattagacattctccctgaggttaaaaacaaaaagtacgtgaccagtctggtaagaagtattaatgaagtagctaatattacagcttcattttctactagcacctatcataatggtcttagtcatttcacacaaatcagaacttccttccccaccagggaggacaacatcttcatgctgtgattgaagcatccattcagaacacgaggcaatattgcagtccacagggaatggatgcttcacttgatctccggaccttggctgcagaggccatcgcagcttttgaaaagtgaaggggttaattcccattggtgtctttgcttatagcatttttctctaacctataacaaggagacattacattttactttagaacatgagaatagcagttttgctcatgacttaccattccagctgcatgggaaagcaaagcagaaaacagtgccccaaatggaaaaaagatactcacacagaacaaaacagttcttggtcttgttcttggtcttgtcaaaccttgcctgatgctctttctaaagtcaaaatatgaatgctaagaaggcataacctacatccttctctgatttcttcagcagggtcaaaagacagttactagcaatggggaatgcttgtcactgtggagaaagagttttgtatatgtctgataccgttgttataacaaaacaaatttttttactatagttttttgttttctacctgcacacccaccagaagagcacaaagcaaggccattgcaacaggcatttaaaaattattatcaaacatgcacatgcttgtacacacacacacacacacacacaaacaggggcatttgtaaaggtgtccctggaatgtaagatttataatgtttaaggcaaggtgaaggcattgccaagtgtgtgtcgctcataggactagtgtatattcactgaaagttaacctgatgatttgttattgtttgaaccatatgctgatttgcttctggtttctgtttagtgtgttctctctgataaggggctgaaagattctgcatcacacatcctctgagacctaccatgtcgcacactttgttaatgacaaacttcactctacactatacagtaccttgttgatatattcagtaaagtcttattttaaaagaaaaccaaaaaaa

SEQ ID NO: 372 - DNA, 3184 bp, Homo Sapiens
gcctgctgctggccgggcgggggacggggccgggaccggagccggagctgcggggcgcaccggctagacgcgcgcgggattctcggcgggcacgccccgcggaccatgagcgtccccagctccgggagcagccgcggcgcgggcggtgcgaggccggccgcgcggcgcctttgagccccagccggaggtccagagatcctgagagcccgagcgcccagcgccgcgccgggagagttgagaattatggctgcaggaaaatttgcaagccttcccagaaacatgccggtgaatcaccagttccccctggcctcatccatggaccttctgagcagcaggtcccctctcgctgagcatcgcccagatgcctatcaagatgtgtctatacatggcacccttccacggaagaaaaaaggtcctcctcccataaggtcctgtgatgacttcagtcacatgggcaccctcccccactccaaatccccacggcagaactcgcctgtgacccaggatggcatccaggagagcccatggcaggaccggcacggcgaaaccttcaccttcagggatccacatcttctggacccaactgtggaatatgtgaagttctccaaggagaggcacatcatggacaggacccccgagaaactgaagaaggagctggaggaggagctgctcctgagcagcgaggacctgcgcagccatgcctggtaccacggccgcatcccccgacaggtgtctgaaaaccttgtgcagcgagatggtgacttcctagttcgtgactctctgtccagccctgggaactttgtcctgacctgtcagtggaagaacctcgctcagcacttcaaaatcaaccggacagttctgcgactcagcgaggcctacagccgcgtgcagtaccagttcgagatggagagcttcgactccatccccggcctggtgcgctgctacgtgggcaaccgccggcccatctcccagcagagtggcgccatcatcttccagcccatcaacaggacggtgcctctgcggtgcctggaggagcattatggcacctccccaggccaggcccgggagggcagcctcaccaagggaaggccggatgtggccaagaggctgagcctcaccatgggtggcgtccaggcccgagagcagaatttgcccaggggaaacctcctcagaaacaaagaaaagagtggtagccagcccgcctgcctggatcacatgcaggacagaagagccttgtccctcaaagcccaccagtcagagagctacctgccgattggctgcaagctgccacctcagtcctcgggtgtggacacaagcccctgcccaaactcacctgtgttcaggacgggaagcgagcctgccctgagcccagcagtggttcggagggtctcctcagacgccagggctggggaggcgctgaggggatcagacagtcaactgtgccctaagcccccgcctaagccctgcaaggtgccgttcctcaaggttccctcgtctccctctgcctggctcaactcagaggccaactactgtgaactgaacccagcgtttgccacaggctgcggcaggggagcaaagctaccctcatgtgcccagggaagccacacagaactgctcacagccaagcagaatgaggcgccaggtccccggaactctggcgtcaactacttgatccttgatgatgatgacagggaaagaccttgggaacctgcggcagctcagatggagaaggggcagtgggacaagggcgagtttgtgacgcccctcctggagactgtctcctccttcaggcccaacgagtttgagtcaaagttccttccccctgagaataagcccctggaaacagcaatgttgaaacgtgcaaaagaactgttcaccaacaacgaccccaaggtcatcgcccagcacgtactgagcatggactgcagggttgctaggatacttggagtctctgaagagatgaggaggaacatgggggtgagctcaggcctggaactcattaccttgcctcacggacaccagctgcgcctggacataattgaaagacacaacacaatggccatcggcattgcagtggacattctgggatgcacgggcactttggaggaccgagcggccactctgagtaagatcatccaggtggcggtggaactgaaggattccatgggggacctctattccttctcagctctcatgaaagccctggaaatgccacagatcacaaggttagaaaagacgtggactgctctgcggcaccagtacacccaaactgccattctctatgagaaacagctgaagcccttcagcaaactcctgcatgaaggcagagagtccacatgtgttcccccaaacaatgtatcagtcccactgctgatgccgcttgtgacgttaatggagcgccaggctgtgacttttgaaggaaccgacatgtgggaaaaaaacgaccagagctgtgaaatcatgctgaaccatttggcaacagcgcgattcatggccgaggctgcagacagctaccggatgaatgctgagaggatcctggcaggttttcaaccagatgaagaaatgaatgaaatctgcaagactgaatttcaaatgcgattgctatggggcagcaaaggtgcacaagtcaatcagacagagagatatgagaaattcaaccagattttaactgccctctcgcgtaaattggaacctcctcctgtaaagcaggcagagctttgataactctccagagaacctttagaatatcttttcaagtttccccagcttcatctttgggaaagcttactgtttttgataaagtaataatgtgcaaatctgacaatatacaagcttttagtatccacaggatattaaacgtgtaaattgcacagagcacacttatttatgaattgtctaaagttactactgattttaaaatgaataatttattattaaggtaactactgctaatgttgatcagcaaatttaagagaagacctagctatgttggctggttgctttctattatcatggtatttgaccattttagttttaattccatgtcagataagtgtaaatagaagagtttaaaagcatgaaacatttcagaaggtatcagttatatgatattctttaaacaaatatgaaaaatgtaaatactcatgaatgaaaatacatctttttgtgaaaaaaaaaaaaaaaa

SEQ ID NO: 373 - DNA, 4877 bp, Homo Sapiens
ggcggattggcgggcacgccccctcgcccgcggccccctccccgcctctctccaccgcctcctctggctccccggtcagagggccggagcgagaagatggcgaagacgtacgattatctcttcaagctcctgctgatcggcgactcgggggtaggcaagacctgcctcctgttccgcttctcagaggacgccttcaacaccaccttcatctccaccatcggaattgattttaaaattagaacgatagaactagatggaaagaaaattaagcttcagatatgggacacagcgggtcaggaaagattccgaacaatcacgacagcgtactacagaggagccatgggcattatgctggtctatgacatcacaaatgaaaaatcctttgacaatattaaaaattggatcagaaacattgaagagcatgcctcttccgatgtcgaaagaatgatcctgggtaacaaatgtgatatgaatgacaaaagacaagtgtcaaaagaaagaggggagaagctagcaattgactatgggattaaattcttggagacaagcgcaaaatccagtgcaaatgtagaagaggcattttttacacttgcacgagatataatgacaaaactcaacagaaaaatgaatgacagcaattcagcaggagcaggtggaccagtgaaaataacagaaaaccgatcaaagaagaccagtttctttcgttgctcgctactttgatgaactctttctgagagactgcagcacacctagagggccctttcctgcttctctgaaagcacaggtcacccagcctcagaatcacacctcccggctgctgctgagagcaccactgaacttagacctctcaacacagtatgccaagtggattccagcctcatggcctagcaaaagaacagactccctttttcaaacatggaagcaatgaagtggagacacatgcaggacctaactcgttttttccttgttttattacctgttgcagaagcggttatctttcttttttactttgcacatcagtgttagcctttccctatttcagcacaatcttagactcatatttgcacacttttgtgtcgtgaagttctagacaaatttgtacatgtggcaatgttaaaagagcatttacagcagaggttaatatactaaaattaaagggtatttggtctggttcatatggtcaaatattactgccttggtagcatttatttaagggctttttcttaaataagaatcattaaagtcattaaaaaaatttactgaaatgcccatcttgtcatcaaaggccacaatttctttatttcttcagattaagagctttgcctcatccccgacctgttttccagagtctgggtagctgaatgaatcactttaaaatgattacctctgcctaatctatagaaactgcatttggaaatcaccataatctcatttttccctggggtttgtatttgctattctttcccatgtttgacttaagtgtaatcactcttaagtaatatttgaacattattatctgtttctatttgtgaacttcttgagctgaaattttacgtgggctgagagatataccatttagggttttagtgcagcatctaactgtgattctgtcaataaggatatgtaatatattttttcttaggttcactccttagctggctggtttagttgtaataccaaattcctaccataatccctgtctacaaaagttaggtttagattttagtttgcggaaaccttccctatatagagacagattaacttgttgatataaatttaatagagctagctcttggtaatggtgaaaataatgagttttggttggttttatttggcagatgtttttagaaataaaagtacttagacctagtgcagcctctaggaaaagtcttgccttttcattagagaaaacaggaccaaggtttcagttttcaaacagctgttgttgattgtgtagaacccagttccatctgttttggttcattgttacagaacttagtccagtcatttgggctaaagccaaccaaaagcttagttgcctttctcaacaaacactggtactggtatacttttgtagatgaaaccatcacaaggtatttagtgttaacttgtgtgccaaattcagatcactatgtcgttgttgctctagccttcagtgtcataacacaggggggataaaacagaggggatgagggaaatgaattctgttaataattattcttcctggtatgcctgttttgcttcacaaaggctactatcatgctggatagataagaacaggagatggcagtggaaagggattgcttgttaccacagagaattctcttcaaattaagatatgtcattagaatgcttggaccagtcaatcttttgtacttatttgaaaatataggaacaatttagcagctgcaaatatgcccaagctatttttaatagatatactaaacttattgttgacaaatttcagcctccttaatttttttttttttggtaattacctataggcttaaaagtcattcgttgctgttctagtataattagtagttccgtgattgaaagtttattgtaattctactatcttcaaattagatacattttcaaaaggaaaagataattttttagaaacatcttaatattcactatttcctgaaaaaatccaagcagttaacgctttctggatggtaacaaagtaccttctaaaagataagtgctatgacaccatgtatgaatgtaattctcttagtaatttacctctgactatttggtgtcttaacgctttggtttatataatctcaggggttgtctgcaaaccaaaactgacatattctgtggttagcttttattacttttttttttaacagaatgctttgctttggttatatttcttctttcttcttttgtcttatatggattaataactagtctccatgaacttcacttgaaagagcctgtaaaagttagatgagtctaaaagtgctctttgaagtagcagcaaattgggagtatatgctctgttatatagaaataaattgtccttgctattttcttacatttagctttgctagattgtatatacattgagctaagaccttaggaaattcactttctgcatgataaaatgacccaataaatattccactttgcttaataatgtacatacagtgcattattttttctatttgtagatgaatttaatgacagataattgtctgttccccgctgaaactgaagaaatctagtttttttgtgaacatttttgtggtcttatggataaggtacatgaagatttttgcagcagtattagtggttcagtggctgcactttattaatcagtgtgttaatttttgacagtgattggactagaccttttcaaatagagtctgagggtatcagacagtgaaaatgtgctgtaactaagtagcatgtaaatcagttgattgtaaaacgtttcgctgggaacttattttagctatattttacttcagacagattatgatacaataatctacctgtgcatcagttagtaggtgctgcagggtttcttactatttacagaaacattttgtgcagtctttgttataaattttcagaagactatactctttactttgaaggtctattttttaattatacctcatttagctaactagtattctaatacctggtagaaaaacagtgagccagcctttaagcatctaacaaaatttagactctttgttttgttttgaactgaagacatcattgggaaaggtaggaaatattagtttaggatagagcatacatgtcatatccagtagcataaaaaaagtattatctccctgtctccattaataaatttagctgtgcaatataggtgcgtttttgcagaagtttctagtaagagattataactccattttacaggttctgaatgctcagagtctatattaaggcttataaagtttttcctgtgatcagtaagtgacacatttaagcagacattcttttcaagttcatgacttagattcctttacaaatttagttctcaatctttaaaaaccacatttcattatgttggttaattattataaattttaagcactcatttctgcaatcaggtttctcagaattttttttttttaaacagaagagacattcctttttccttgttacatccaaggggggcacaggggtgggtggaaaggaatgtctaaaaatgaaatcccttgatatagagggacctagacggacaggatatgctaaaataatttcaaattctagcacaattttagagtagaataagtcatttttttagactaataaaattaatggctgtcatgttcactctgaaaaaaatctaaatgactgaaatgtacagaaataaaaattagcaaacaattattctagggatattttcagattttacttcatttcttgaaatgcgtgtgccatatgcaattgcatttcttgtgccaagaaactaatagaacttatttcactttacctttttttaaaatgtgaatttagttattatagttcaattttatggccttacagatggcttttattttgtttgcagctgacactgcagttcctttcatgcaaaataccataaactgtttgatgaaaatcatgcccctaatggaaactctctagtttttccatataactatcctactgtacatgtttaaacatattttatttttgctccaatggcttaatgtgaaaagctcctgcagataagtggacctgtcatgtggttaatcttgtttaagccaattcattaactgtgtactgatactgatgctatgttttttttaaatggattttattccaggtgaactttttttttataataatgttcgtctaaaataaaaactacataatgaaaatgaaaa

SEQ ID NO: 374 - DNA, 1409 bp, Homo Sapiens
acactgcatttacagcgcgcatagcgcccacgcacgcgcactggggtgtccgccgggcatcgctctgtccagttattccagtttctctgggagcagccgagttgaccccacggtctgagatgtccaagctgcccgcagacagcagtgtcccgcagacaggcgcggcgaatggtgacagagacgtcccgcaggcggaggtaggccgcgggaggcgggagccggccccggcacagcctgaggaggccggggaaggcgcgatggcggcggccaggggaggcccggtgccggcggccagggaaggtcggatggcggcggccagggcagccccggcggcggcagccaggggagccccggtggcagcggcggcgttggccagggcagccgcggcgggcagggaaagcccggcggcggcggcggccagggaagcccggatggcggaggtcgcccgcttgctgggggagccagtggacgaagagggtcccgagggcaggcccaggtccagacacgggaacggaggcctggctgcgttgccctatctccgtctccgccacccacttagcgttttaggcatcaattaccagcagtttctccgccactatctggaaaattacccgattgctcccggcagaatacaagagcttgaagaacgccgcaggcgattcgtggaagcctgcagagcaagggaagcagcgtttgatgccgaatatcagcgaaatcctcacagggtggacctcgatattttaacctttacgatagctctgactgcctctgaagttatcaaccctctgatagaagaacttggttgcgataagtttatcaatagagaatagttatgtggtgacactacttcaagagaacctctgcattccagtcataccaatcctgcaacttgattttcagaagtcaagagtatatcgcgataagacagtgcacaggtggaggggaaaaaaagggggagggggaagcttatcttgaaaaagcatcacagaagtagaaaaaaatgtcgaaagcattataactgtaacgttctttgagtttgtgattgatccacatttttccccctgcattatggaaaatgtctctcagcattgctttattacaaagtaaaggatggttttataaaattgagactgatgaaacatcaatactagagcccatgaggatgaaagaaattatcaaatagtgctgaacagaataagatgttaacgctgagttattaggactggaaggctatgaaaagaacttgaaattgtcggaatatgtgctctcttcatgtcatattcaatagaagtttctagtttaagattgattttgtgttttcttaggcatttcaagtgacaagcaaagtaaatgtatatattatgtgataaatcatgttttcaagaacgtcaaaaaaaaaaaaaaaaaaa

SEQ ID NO: 375 - DNA, 4410 bp, Homo Sapiens
cctcctccacagtggtgaggtcacagccccttggagccctccctcttcccacccctcccgctcccgggtctcctttggcctggggtaacccgaggtgcagagctgagaatgaggcgatttcggaggatggagaaatagccccgagtcccgtggaaaatgaggccggcggacttgctgcagctggtgctgctgctcgacctgcccagggacctgggcggaatggggtgttcgtctccaccctgcgagtgccatcaggaggaggacttcagagtcacctgcaaggatattcaacgcatccccagcttaccgcccagtacgcagactctgaagcttattgagactcacctgagaactattccaagtcatgcattttctaatctgcccaatatttccagaatctacgtatctatagatgtgactctgcagcagctggaatcacactccttctacaatttgagtaaagtgactcacatagaaattcggaataccaggaacttaacttacatagaccctgatgccctcaaagagctccccctcctaaagttccttggcattttcaacactggacttaaaatgttccctgacctgaccaaagtttattccactgatatattctttatacttgaaattacagacaacccttacatgacgtcaatccctgtgaatgcttttcagggactatgcaatgaaaccttgacactgaagctgtacaacaatggctttacttcagtccaaggatatgctttcaatgggacaaagctggatgctgtttacctaaacaagaataaatacctgacagttattgacaaagatgcatttggaggagtatacagtggaccaagcttgctggacgtgtctcaaaccagtgtcactgcccttccatccaaaggcctggagcacctgaaggaactgatagcaagaaacacctggactcttaagaaacttccactttccttgagtttccttcacctcacacgggctgacctttcttacccaagccactgctgtgcttttaagaatcagaagaaaatcagaggaatccttgagtccttgatgtgtaatgagagcagtatgcagagcttgcgccagagaaaatctgtgaatgccttgaatagccccctccaccaggaatatgaagagaatctgggtgacagcattgttgggtacaaggaaaagtccaagttccaggatactcataacaacgctcattattacgtcttctttgaagaacaagaggatgagatcattggttttggccaggagctcaaaaacccccaggaagagactctacaagcttttgacagccattatgactacaccatatgtggggacagtgaagacatggtgtgtacccccaagtccgatgagttcaacccgtgtgaagacataatgggctacaagttcctgagaattgtggtgtggttcgttagtctgctggctctcctgggcaatgtctttgtcctgcttattctcctcaccagccactacaaactgaacgtcccccgctttctcatgtgcaacctggcctttgcggatttctgcatggggatgtacctgctcctcatcgcctctgtagacctctacactcactctgagtactacaaccatgccatcgactggcagacaggccctgggtgcaacacggctggtttcttcactgtctttgcaagcgagttatcggtgtatacgctgacggtcatcaccctggagcgctggtatgccatcaccttcgccatgcgcctggaccggaagatccgcctcaggcacgcatgtgccatcatggttgggggctgggtttgctgcttccttctcgccctgcttcctttggtgggaataagtagctatgccaaagtcagtatctgcctgcccatggacaccgagacccctcttgctctggcatatattgtttttgttctgacgctcaacatagttgccttcgtcatcgtctgctgctgttatgtgaagatctacatcacagtccgaaatccgcagtacaacccaggggacaaagataccaaaattgccaagaggatggctgtgttgatcttcaccgacttcatatgcatggccccaatctcattctatgctctgtcagcaattctgaacaagcctctcatcactgttagcaactccaaaatcttgctggtactcttctatccacttaactcctgtgccaatccattcctctatgctattttcaccaaggccttccagagggatgtgttcatcctactcagcaagtttggcatctgtaaacgccaggctcaggcataccgggggcagagggttcctccaaagaacagcactgatattcaggttcaaaaggttacccacgagatgaggcagggtctccacaacatggaagatgtctatgaactgattgaaaactcccatctaaccccaaagaagcaaggccaaatctcagaagagtatatgcaaacggttttgtaagttaacactacactactcacaatggtaggggaacttacaaaataatagtttcttgaatatgcattccaatcccatgacacccccaacacatagctgccctcactcttgtgcaggcgatgtttcaatgtttcatggggcaagagtttatctctggagagtgattagtattaacctaatcattgcccccaagaaggaagttaggctaccagcatatttgaatgccaggtgaaatcaaaataatctacactatctagaagactttcttgatgccaagtccagagatgtcattgtgtaggatgttcagtaaatattaactgagctatgtcaatatagagcttctcagttttgtataacatttcatactaaagattcagcaaatggaaaatgctattaatttggttggtgaccacaagataaaatcagtcccacgttggctcagttcaactagatgttccctgatacaaagagaacttgatttccttaaaactgaaaagccaaacacagctagctgtcatacaagaaacagctattatgagacatgaaggagggtaagaattagctttaagttttgttttgctttgttttgttttttaactcaacctattaatcatctcttcacaagaatccacctgatgtgaccaagctattatgtgttgcctggaaaaactggcaagatttcagcttatgtggcctagcaaactaagaattgctcttcttggccagcctcatagcataaaagatgtgaactctaggaagtctttctgagtagcaataagtgggaattatgggcagagcacactcaatcccctgttgattaataaaacaggctggacactaattaactatgggacttaaatctgtagaaatgaaggagtccaatagcttcttccaattttaaaactctagtacatccctttccctcaaatatatatttctaagataaagagaaagaagagcactaagtaagtagaatctgtttttcctattttgtagggctgctgactcctagtccttgaagcctagacacatgacccaggaaatttttcctttgtttcacttttgattatgatgtctgagccaaaaattcaattaagtaaacatactcgcctggatctgaatcattcatttaattactagatctacccagctgttatatcaggccaaaaacagattcgtgtttatataaaagagtaaacgatggttgcaaattttggctatttagagttgctacttcactatgaagagtcacttcaaaacacttcgcttgtctttagggatgatttttgccatttccagtccacggtatgatactaaagctgtcaagagaggtttcttcttttctgaaactgccagctctttccagccctgttgatcactggacataaagcttcttttccccaataattcttctttacttaaaatagtcaggatctttatctacagatgtactctccaggttacctgtgatgatagccccctaatgtcctgctagaaaagtctccaagcagagatgacattacttctgaatgctcataaaccacaccatgaaataaaagctctttgttgttttaagattgtgaagtgtcgttaatgggtccccacagatggtccctgctggactcacctggaatctctccacagccatacccactcatcactatcattgagacctgcacatcttaatagaaatattataaacatcgaaaatcatgacttacctagaagttcgcttgtaactaatgaaattaaacaaatgtgttgccttttgtcatgtgtttctctcctgtgacatttcaaaatatcacatcttgataaataatgtgtttcatcttgaatagctgaactaattgctttggaaacagagtcctagaaaagtgacttcaacagaattgttactaaaatttgcactcacaacatgaaataaattttcttcctatggaataatcgtgaaaaaaaaaa

SEQ ID NO: 376 - DNA, 7289 bp, Homo Sapiens
gctgcaattcaagttggctgggggccggtagtgagatctagggctacttcaacaaaactttgctgcccttcctgctcctcttgtcttcttttctcctgataccttttgatgctctgcacatgttatttgcatagcaaaggcactaagctttccaggaagagagggcaccacttccacccccaataagtcttttttcccgtcttttctttcttttcctttccttttttggggggtggggagggagagaaagggggtttgcaaaggcagcatctcagagtgatagcctagatgtattgaaggcatctcttattctgccaaatcggaaagtcagttctctaaagcccgggttagccagaccatagggttttattctggctgcagaataactggctggtgtggctttgcaaaggggggcaaaaaataaaaaaataaaaaaaattaaaaaaagttagagaggagagggagtacgtgagtcgtccagtgcaatctctattgtctgaaacttactttttatcagaatttgaagatgaaaacggttaaaaaatggccatactttagtaactaatcagcctaatgctttgcttatgaaaacttttaccatcattatttttttcattttggattgagaaaatgaatccagatatagaagaaagtgcaggatgttggataaaagtggctcttaaacagtggaacatccaataactaatttgcaagaagttttaaagaaataaaattgttatgcttcgattttggtatggtattgactctttagcacataggtagccctcaaaaaaatcatccagttttctaaattatggaaattttgtggaagacgttgacctggattttgagcctcatcatggcttcatcggaatttcatagtgaccacaggctttcatacagttctcaagaggaattcctgacttatcttgaacactaccagctaactattccaataagggttgatcaaaatggagcatttctcagctttactgtgaaaaatgataaacactcaaggagaagacggagtatggaccctattgatccacagcaggcagtatctaagttattttttaaactttcagcctatggcaagcactttcatctaaacttgactctcaacacagattttgtgtccaaacattttacagtagaatattgggggaaagatggaccccagtggaaacatgattttttagacaactgtcattacacaggatatttgcaagatcaacgtagtacaactaaagtggctttaagcaactgtgttgggttgcatggtgttattgctacagaagatgaagagtattttatcgaacctttaaagaataccacagaggattccaagcattttagttatgaaaatggccaccctcatgttatttacaaaaagtctgcccttcaacaacgacatctgtatgatcactctcattgtggggtttcggatttcacaagaagtggcaaaccttggtggctgaatgacacatccactgtttcttattcactaccaattaacaacacacatatccaccacagacagaagagatcagtgagcattgaacggtttgtggagacattggtagtggcagacaaaatgatggtgggctaccatggccgcaaagacattgaacattacattttgagtgtgatgaatattgttgccaaactttaccgtgattccagcctaggaaacgttgtgaatattatagtggcccgcttaattgttctcacagaagatcagccaaacttggagataaaccaccatgcagacaagtccctcgatagcttctgtaaatggcagaaatccattctctcccaccaaagtgatggaaacaccattccagaaaatgggattgcccaccacgataatgcagttcttattactagatatgatatctgcacttataaaaataagccctgtggaacactgggcttggcctctgtggctggaatgtgtgagcctgaaaggagctgcagcattaatgaagacattggcctgggttcagcttttaccattgcacatgagattggtcacaattttggtatgaaccatgatggaattggaaattcttgtgggacgaaaggtcatgaagcagcaaaacttatggcagctcacattactgcgaataccaatcctttttcctggtctgcttgcagtcgagactacatcaccagctttctagattcaggccgtggtacttgccttgataatgagcctcccaagcgtgactttctttatccagctgtggccccaggtcaggtgtatgatgctgatgagcaatgtcgtttccagtatggagcaacctcccgccaatgtaaatatggggaagtgtgtagagagctctggtgtctcagcaaaagcaaccgctgtgtcaccaacagtattccagcagctgaggggacactgtgtcaaactgggaatattgaaaaagggtggtgttatcagggagattgtgttccttttggcacttggccccagagcatagatgggggctggggtccctggtcactatggggagagtgcagcaggacctgcgggggaggcgtctcctcatccctaagacactgtgacagtccagcaccttcaggaggtggaaaatattgccttggggaaaggaaacggtatcgctcctgtaacacagatccatgccctttgggttcccgagattttcgagagaaacagtgtgcagactttgacaatatgcctttccgaggaaagtattataactggaaaccctatactggaggtggggtaaaaccttgtgcattaaactgcttggctgaaggttataatttctacactgaacgtgctcctgcggtgatcgatgggacccagtgcaatgcggattcactggatatctgcatcaatggagaatgcaagcacgtaggctgtgataatattttgggatctgatgctagggaagatagatgtcgagtctgtggaggggacggaagcacatgtgatgccattgaagggttcttcaatgattcactgcccaggggaggctacatggaagtggtgcagataccaagaggctctgttcacattgaagttagagaagttgccatgtcaaagaactatattgctttaaaatctgaaggagatgattactatattaatggtgcctggactattgactggcctaggaaatttgatgttgctgggacagcttttcattacaagagaccaactgatgaaccagaatccttggaagctctaggtcctacctcagaaaatctcatcgtcatggttctgcttcaagaacagaatttgggaattaggtataagttcaatgttcccatcactcgaactggcagtggagataatgaagttggctttacatggaatcatcagccttggtcagaatgctcagctacttgtgctggaggtgtccaaagacaggaggtggtctgtaaaaggttggatgacaactccattgtccagaacaattactgtgatcctgacagtaagccacctgaaaatcaaagagcctgcaacactgagccctgcccacctgagtggttcattggggattggttggaatgcagcaagacttgtgatggtgggatgcgcacaagggcagtgctctgcatcaggaagatcggaccttctgaggaggagacgctggactacagtggttgtttaacacaccggcctgtcgaaaaagagccctgcaacaaccagtcatgtccaccacagtgggtggctttggactggtctgagtgtactccaaaatgtggtccaggattcaagcatcggattgttctgtgcaagagcagtgacctttctaagacattcccagctgcacaatgtccagaggaaagcaaacctcctgtccgcatccgctgcagtttgggccgctgccctcctcctcgctgggtcacaggagactggggccagtgttctgctcagtgtggccttggacagcagatgagaactgtgcagtgtctctcctacaccggacaggcatctagtgactgtctagaaactgttcggcctccatcaatgcagcagtgtgaaagcaaatgtgacagtacccccatttctaatactgaagagtgcaaagatgtgaataaagtggcttattgcccactggtgctgaagttcaagttctgcagtcgagcatacttcagacagatgtgttgtaagacctgccaaggacactgacccacagaaagccagagagagtgccttgtcatttcatcatggaaatgcatccatcaaagagagccacccagaggaagaggattgatgtccttgcaaatgcattaccctgtggaaaacgtaaccactggtcagccctagctgacaaaatttcaatattattttagcttctgtgaagtgggatttattgatccaaagtgctggacacggtattaggagggaatgccagattggagagatccaaacaacacagggagacttgcttactgtggagcgtttgtgttctttcgagtaaatccaatagcctgtttacctccttggaccattaagataatttttattatggacttagcaatgacactgaatccatttgtatttaaaactgtttaaaatgtagctgttatgacttggtcaactatggaagtgaagaaggttcagaattcttaagtcatagcttaaaaatatttactgtactttatctcactacaacagcaccacaatttaaattataaaacgggctttgaactataatttaaggagcaattataaatcaaaagtaatgaaagtttgtattatttttcttcattccacttaatttccttaggaataatcccctggttctgaacactgctgtgagccatatataaaactatattaaactgaacaataatgaggggcatagtttaaagcagtgcatcagttactgcagctgtgcaagtctataaactcagtgctgaaagactgtggccaacttgccattgtgcaagtaaagctgagatttccattaaaactttaagagaaaaacatttcaatttcatgcagaaaccagacctggggtatggtacagaccaaaggaccaggccctttgctgccaccacacaggatgccttagttcttatttgagtccctccaactcacttgtgtttacatcctccccagccacagcacggcttctgccctttggattgctgcacgtgtgttgagcttactgagatgataccatgcaaaagatagactggctcggtaaccaggcagacccttttgcagtttgttgacaattacgatgagttccagatgtcccttctttgatatggtagaagggcatttatttatatgagagcaaatgtgtgtgtgtgtttgcgggcgcttttaagtgtgtggatagatgagtgtgcttgcacataatgtgctatttctgtgagttttaaagtaggcaagggataataaccaaagaagaaaatttcatgaagactagacatcataaagcataattttaatagtcactcaaccaagtattttttattttttatggatactctgaatggcaattaaatgtgaaacccagtttcttgggcaagtcaaattctggaatcacatccacctaaattaaaatgactagctcgtattttccccatcttcaagtttcacatcctggtcatcaaaagactcgacagcaagacttagaatgaaaaagggtacttgtttatattaatattttttacttgaacacgtgtagcttgcagcaggttcttgatgaatgtgctttgtgtccaaaatgcctccccattgtacacaggtgtacaccatgcatgcaccaacacctaaaactcaaaactaaatggctattttgtaaggttaatactttcagttaaacagcatgtttgacttgattccatcatggtgctcttaaattacatgtcagtgcatcacatatatcatgatctaatgcagatgactaggctttttccaaaaggaagacagaccctcagacaccaaaagccaatctaaacaactcccaggtttgctgtggacaatcagcatggaatgttttctgcactctcagtcatgaccatctgtatcttgttacctgctttctctctcaacaccacagttctcaaccctgagccttccagagagagctattgatgatacaagaggaatcaccagggcccggatctaagatgcccttagaagaccagcccaagtgccgtcttagccattcagtgaagggcaaacagcccatgggtagtatggcccgagcactgaattcccttgcgccttttcaaagaacagttaacttggtgctaatgtgccctggtgaaataaataaaagatgggcagtttctgtggcattttaggcataggtttgcaatccagatctgattttctccaacataaatatcagctcatgttcttatttcaaaaagatttcttattaccgactaaaagctattttttacctcacctggaaactaccattgtgagggccatcccccaggcactgcacagcaccttggctgatgctggaagaggagggcagtcagtgtcacttctgggatgtgccccagcactgagaacaaaatgcaggcatcccccggggcagcatcagagtgcctttctagagggagccacgcacagaatgtaacaggatgaaacagtttcaagtaagccttgaattgaaacctgagtaggttaaaacaattctatttcatagcacatcacaatactgctgctactctgtagccacccccatggctacatgatgccctattcctaaataataacaatagcattgtcagtggaggctgggccaccatggcagaccttccaaaagtagtgagctacatagactacttagggaaccccagggaaactggtaccctacacctgggagcagtatctgccactgggataaagtcctactaaaaaaggaacggtaaatgtaccctaatgattaaaccccgtgagatacatatgatttccaaatagtccatttcattaggaacttttttgtttgaatgaatgtcacataggtatcctcagtaacacagaacgaaattacctttgtattattgtgattagttgttgcttattattttatactcagtaataatgtggtacactgttaatttttttgcttttgtaaattatattctaatttattgccatgtttcctaacacttgtcctacattcattctcctgcttgtaatgaaaatgaaaaaatcattgtaacacttgatggagtgaaattccacgccaggcacagaatttttttgacatagataatttagtaaaataaaaattcagcttataataatgataaaaaaaaaaaaaaaaaaaaaa

SEQ ID NO: 377 - DNA, 2839 bp, Homo Sapiens
gcacagcgctgggcgctggggaggctgcgccgcagcacccggttggtcaggaccaagtgggcccgaggcggacgtgagaagggtcgggccaagatggcggtgcaggtggtgcaggcggtgcaggcggttcatctcgagtctgacgctttcctcgtttgtctcaaccacgctctgagcacagagaaggaggaagtaatggggctgtgcataggggagttgaacgatgatacaaggagtgactccaaatttgcatatactggaactgaaatgcgcacagttgctgaaaaggttgatgccgtcagaattgttcacattcattctgtcatcatcttacgacgttctgataagaggaaggaccgagtagaaatttctccagagcagctgtctgcagcttcaacagaggcagagaggttggctgaactgacaggccgccccatgagagttgtgggctggtatcattcccatcctcatataactgtttggccttcacatgttgatgttcgcacacaagccatgtaccagatgatggatcaaggctttgtaggacttattttttcctgtttcatagaagataagaacacaaagactggccgggtactctacacttgcttccaatccatacaggcccaaaagagttcagagtatgagagaatcgaaatcccaatccatattgtacctcatgtcactatcgggaaagtgtgccttgaatcagcagtagagctgcccaagatcctgtgccaggaggagcaggatgcgtataggaggatccacagccttacacatctggactcagtaaccaagatccataatggctcagtgtttaccaagaatctgtgcagtcagatgtcggcagtcagcgggcctctcctacagtggttggaggacagactggagcaaaaccaacagcatttgcaggaattacaacaagaaaaggaagagcttatgcaagaactttcttctctagaataaatcaggagacaaaatggggaaagatgaaaatatccagtgtaaagttacttaagctaaatcaatttcaaagaagaaaaacttggaggactcattttacctgacttcaagacttactataaagctatagtaatcaagatagatggtattggcagaggaacagacacatacgtcaatggaacagatgagagaacccagaaataaacccatataaatatgctcagctgattttgaaaaagtgaaaaagcaattcaatggaggaagaatagcctttctgacaaattatgctagagcaattagacacccatggcgaggagaaaaaagaacctctacttaaacctcacatcttatataaaatttaactcaaaatgtataacggacttaaatgtgatacataaaactagataactttgaaaaaagccacaggagaaaaatcttcaggatcttgggctaggtgacaagttcttggactttgccccgaaagcacatccataaaagacaaaatctgatatattggacttcttcaaaatttaaaaacttgtgatttaagaagaggaaaagataagctacagattgagatgaatttgcaaaccatatatctgatcaatttggaatatataaagtgtactaaaaactcaactgaagtcaggcatggtagctcatgcttgtaatctcaccactttgggaggccaagatgggaggagtgcttgaggttaggcgttccagaccagcctgggcaacatagtgagactcttgtctctacaaaaagtttttttaaaaaattaactgggcaccatgacacacaccagtagtcccagctactagggaggcaggaggatcacttgagcccaggagtttgaggctgcggtgagctgtgatcacaccaccacactccaacctgtgtaacagagtgaggcctcatctcaaaaaaaaaaaaaggccacaaaactcaacaataaaaacaaacagtccaattagaaaatgggcaaaagacatgaatagatgtttcactgaagaggatctatagatggcaagtaagcatatgaaaagctgttaaactccataagtcatcagggaatgcaaattgaaaccacagcgaggctatgacttacttatctcaatggctaaagaaaaaatagtgaaaataccaaatactgatgaggatacaaactggatattttatacattgctgacaggaatgtaaaatggtacagccactctgggaaagagtttatgaatttcttatcaagttaaacataattttttaatcaagttaaacataagacccagcagttgtgctcctggacattcattccagagaaatgaaaacctatattgtacttgtactcaaatattcataggagctttatttgtaatagccccaaactggaaacaacccagatgtcctacaacaggtacatggttaaacaaaccatccataacttggaatactgctctggaatgaaaaggaactaactgttgatacaagaacttggttgtacctcaggggtattatggtgaacaaaaaaaaaaccagtctcaaatggtcacatactgtatgatcgcatttatataacattcttgaggtgacaaaattattgaaatgaagaacagattaatggttgccagggatagggactggagggggtgtggggtatgtatgactataaagggatgacgcaaggagttcctttgtgctgatggaacagttctatatgattatgatgattacgatgttgattataacatttgattatgaggttaagcacatgagtctttacctgtgctgaagttgtatggacctacatacacacaaatgaatgcatgtaaaatctggtgatactgaataaagtctgtggtctagatagcagta

SEQ ID NO: 378 - DNA, 1770 bp, Homo Sapiens
gaggagtggattacatattccaacagttgttattacattggtaaggaaagaagaacttgggaagaaagagtttgctggcctgtgcttcgaagaactctgatctgctttctatagataatgaggaagaaatggtatgtgtggggacttcccagttggctgtaagttgccatttgaactaaacgaaatagatcaggaactgaggacatatctaaattttctagttttatagaaggcttttatccacaagaatcaagatcttccctctctgagcaggaatcctttgtgcattgaagactttagattcctctctgcggtagacgtgcacttataagtatttgatggggtggattcgtggtcggaggtctcgacacagctgggagatgagtgaatttcataattataacttggatctgaagaagagtgatttttcaacacgatggcaaaagcaaagatgtccagtagtcaaaagcaaatgtagagaaaatgcatctccattttttttctgctgcttcatcgctgtagccatgggaatccgtttcattattatggtagcaatatggagtgctgtattcctaaactcattattcaaccaagaagttcaaattcccttgaccgaaagttactgtggcccatgtcctaaaaactggatatgttacaaaaataactgctaccaattttttgatgagagtaaaaactggtatgagagccaggcttcttgtatgtctcaaaatgccagccttctgaaagtatacagcaaagaggaccaggatttacttaaactggtgaagtcatatcattggatgggactagtacacattccaacaaatggatcttggcagtgggaagatggctccattctctcacccaacctactaacaataattgaaatgcagaagggagactgtgcactctatgcctcgagctttaaaggctatatagaaaactgttcaactccaaatacatacatctgcatgcaaaggactgtgtaaagatgatcaaccatctcaataaaagccaggaacagagaagagattacaccagcggtaacactgccaaccgagactaaaggaaacaaacaaaaacaggacaaaatgaccaaagactgtcagatttcttagactccacaggaccaaaccatagaacaatttcactgcaaacatgcatgattctccaagacaaaagaagagagatcctaaaggcaattcagatatccccaaggctgcctctcccaccacaagcccagagtggatgggctgggggaggggtgctgttttaatttctaaaggtaggaccaacacccaggggatcagtgaaggaagagaaggccagcagatcagtgagagtgcaaccccaccctccacaggaaattgcctcatgggcagggccacagcagagagacacagcatgggcagtgccttccctgcctgtgggggtcatgctgccacttttaatgggtcctccacccaacggggtcagggaggtggtgctgccccagtgggccatgattatcttaaaggcattattctccagccttaagatcttaggacgtttcctttgctatgatttgtacttgcttgagtcccatgactgtttctcttcctctctttcttccttttggaatagtaatatccatcctatgtttgtcccactattgtattttggaagcacataacttgtttggtttcacaggttcacagttaagaaggaattttgcctctgaataaatagaatcttgagtctcatgcaaaaaaaaaaaaaaaaaaaaaaaaa

SEQ ID NO: 379 - DNA, 3907 bp, Homo Sapiens
gaaccggtagtccgcggtggcgcggtccgcccctcacctggccagcggcgggcgctgaggggcccaatgggagccgcggcctggccgccccgccccgcgcctccggacgtctgtgccgggacaaggccgccgctggtgccgggtccttgaggagagcgcctcccgtccgaggccagccgcctctgtcagccgtccgcgcgggccgggtctgaagcgccgccgggacggcgaagagccgcggccgccgcggagaaggaggcagcgcaggaggccggagcggccgccgcgcccgagcacatggcgtccatcttactgaggagctgccgcggccgggcgcccgcccgcctcccgccgccgcctcggtacaccgtcccgcggggtagtccaggggatcctgctcatctcagctgtgccagcaccctggggttgaggaactgcctgaatgttccatttggctgctgcactcccatccaccctgtgtacacatcctccagaggcgatcacctcggctgttgggctctgaggcccgagtgccttcgcatagtgtcgagagcgccatggacctctacctctgtgggttttgtggctgtgggacctcagtgccttcctgtgcgtggctggcactcttcgcgccctgttcgcgatgactcggtagtagagaagtccctcaagtccttgaaggacaagaacaagaagctggaggaaggcggcccggtgtacagcccccccgcagaggtggtggtgaagaagtccctggggcagcgggtgctggacgagctgaagcactactaccatggcttccgcctgctatggatcgacaccaagatcgcggcacgcatgctctggcgcatcctcaacggccacagcctgacccgccgggagcgcaggcagtttctccggatctgcgctgacctcttccgcctggtgccgttccttgtgttcgtggtggtgccgttcatggagtttctgctgcctgttgctgtgaagctcttccccaacatgttgccatccacatttgagactcagtcactcaaggaggagaggctgaagaaggagcttcgggtcaagctggagctggccaagttcctccaggacaccatcgaggagatggccttgaagaacaaggcagccaagggcagcgccaccaaagacttctctgtgtttttccagaagatccgggaaacaggggagaggcccagcaatgaggaaatcatgcgtttttccaaattatttgaggatgagctgaccctggacaacctgacacggccgcagctggtggccctgtgcaagctgctggagctacagtccatcggcaccaacaacttcctgcgcttccagcttaccatgcggctgcgctccataaaggcagacgacaagctgattgctgaggaaggggtggacagcctgaatgtcaaggagctgcaggcagcgtgtcgggcacgaggcatgcgggccctgggcgtcacggaagaccgcctgaggggtcagctgaagcagtggctggacctgcacctgcatcaggagatccccacatcgctgctcatcctgtcccgggccatgtacctcccggacaccctctctccagccgaccagctcaagtccacactgcagaccctcccagagattgtggcaaaggaagcacaggtgaaagtggccgaggtggagggcgagcaggtggacaacaaggccaagctggaggccacgctgcaggaggaggcggccatccagcaggagcaccgtgagaaggagctgcagaagcgctcggaggtggcgaaggattttgagcccgaacgtgtggtagctgctccccaaaggccggggaccgagccacagccagaaatgcctgacacagtcctgcagtcagagaccttgaaggacactgccccggtgctggagggcttgaaggaggaagagatcacgaaggaggaaatcgacatcctcagcgatgcctgctctaagctgcaggagcagaagaagtcactcaccaaggagaaggaggagctggagctgctgaaggaggatgtgcaggactacagcgaggacttgcaggagatcaagaaggaactttcaaagactggtgaagaaaaatacgtggaagaatctaaagccagcaagagattgacaaaaagggtgcagcaaatgatcgggcagatcgatggcttgatctcgcagctggagatggaccagcaggctggcaagctggccccggccaacggcatgcccacgggggagaacgtcatcagtgtcgctgagctcatcaacgccatgaagcaagtcaagcacattcccgaaagcaagctcaccagcctggccgcagcactggatgaaaacaaggatggcaaggtcaacatcgacgacctcgtcaaggtgattgagctggtggacaaagaagatgttcacatctccaccagccaggtggctgagattgtagcaacactggaaaaagaggagaaggtggaggagaaggagaaggccaaagagaaggcagagaaggaggtcgcagaggtgaagagctagaaccactggcctgggcacctgtcctcctgctgtgccgtcaccctggcaagggccgtgagggcgattgctttgtggtgattctcagtggctcatctaatattttggctggaataaatcagagacttccataatcaagtaaattttaattttcatcattccatggagattcagtctgtctggaatcccggaacccctccacagaatcgtgtctggatccacactgtggtgtggctgccacggcctcctggctccagaggcagctgggccgggccaaggcaggaaggcgcccccatgtgtgtggcctcagtctcagcatctgactgtgctgccctgtccccagggaagagaatgaggaccacgtggactccgcccacacagagctggctgctgtgcccaccctcaggggcgtcaggagacacagcctggcctcctcagggctgaagatgcctccattcgcctgtggaccttgatttctagatttcagtgtcaatagacctgtcttcctgcacactttcagttggatgtgggtcattgtggagacagaggtgtctgccatctctgtggcctctggagagtgacgtctccctgctgggagtgctggttctcacgtgcggtttcccttgtgtatcggagctctttctcggctttctatttcccccagttctttaagcagtcaattggcacagagtttcccacgggggctgcagtggattcactgtgtcagggatgagcctggcttgggggttggtggggctctgaagcgcatttggggttctttgtagcttctaatgtgaggtttgagtccagtgcgcccacagcagcatgcccttctcaccccttgcagtgttgcaggctcaggcccctgggctccttcagcaagcaggctagtcaatgaggcatgaggatccggcacagggcatcccctggggcttcaagggcaatacccccgtgcttagggtttgccctgtgccctctgggtggggtggcctccccgcactcggcagcatggccaggctggccagggcgtgggcaggtggtgtcctgtggcacctccatcctcctgcccagccggctgtgtcacactcatctttttaaggtcaggttggttcctggcaaaaatgtacctccaggggcctccaagcataggatttggaagacaggaacggcacaggcgtccaggaaagcagctgcactcagacaatgccttctccattacttgaagcttctttctgttcagccattaaagaaacttgacaaaataggaacaggagatatttctcaattgtaaacctttgtgcagggacagttggcttccagaggtttcagctttcagttatttgagaagtttgttttagatccttaactaatatttatgaattctctcaccctg

SEQ ID NO: 380 - DNA, 878 bp, Homo Sapiens
cagattttcaggttgattgatgtgggacagcagccacaatgaggaactcctatagatttctggcatcctctctctcagttgtcgtttctctcctgctaattcctgaagatgtctgtgaaaaaattattggaggaaatgaagtaactcctcattcaagaccctacatggtcctacttagtcttgacagaaaaaccatctgtgctggggctttgattgcaaaagactgggtgttgactgcagctcactgtaacttgaacaaaaggtcccaggtcattcttggggctcactcaataaccagggaagagccaacaaaacagataatgcttgttaagaaagagtttccctatccatgctatgacccagccacacgcgaaggtgaccttaaacttttacagctgacggaaaaagcaaaaattaacaaatatgtgactatccttcatctacctaaaaagggggatgatgtgaaaccaggaaccatgtgccaagttgcagggtgggggaggactcacaatagtgcatcttggtccgatactctgagagaagtcaatatcaccatcatagacagaaaagtctgcaatgatcgaaatcactataattttaaccctgtgattggaatgaatatggtttgtgctggaagcctccgaggtggaagagactcgtgcaatggagattctggaagccctttgttgtgcgagggtgttttccgaggggtcacttcctttggccttgaaaataaatgcggagaccctcgtgggcctggtgtctatattcttctctcaaagaaacacctcaactggataattatgactatcaagggagcagtttaaataaccgtttcctttcatttactgtggcttcttaatcttttcacaaataaa

SEQ ID NO: 381 - DNA, 1077 bp, Homo Sapiens
ttagcacctggcactaggcggagagaggcggtaagccgcgaggaggaaaggactcacgtcccgctgtggaccgatcctgctaagcagagaatcgctgtggccggacgacggggcgtcgagacaagaagaaagacgttggcaactcccacaaggcctagggccacgtcccgccgtcctcggctgctgagcctgatgggacaagtagttttgcgaacggcttaacctactgattgaagaggtcggaagctctgaggcccggggcttccggaggtcgcggagatggaattggagcagagagaagggaccatggcagccgtgggctttgaggagttctcagcgccgccaggctcagagttggcgttgcctcccctatttggtggccacatcctggagagcgagctggagacggaagtggagtttgtgtcaggtggtctgggcggctcagggctccgggagcgagatgaagaggaagaggcagcccggggtcggcggcggcgccagcgggaattaaatcgcagaaagtaccaggcactaggtcggcgctgccgggagatcgagcaggtgaacgagcgggtcctgaacaggctccatcaggtgcagaggataactcggaggctgcagcaggaacggaggttcctcatgagagtgctggactcctacggggatgactaccgggccagccagttcaccattgtgctggaggatgagggcagccagggcacggatgcccccaccccaggcaatgcggagaatgagcctccagagaaagagacactgtccccgcccagaaggactcctgcacccccagaacccggcagcccagcccccggtgaggggcccagtgggcggaagaggcggcgagtgccacgggatggacgccgagcaggaaatgcgctgactccagagctggccccggtgcagattaaggttgaggaagactttggctttgaagcagatgaggccctggattccagttgggtttctcggggtccagacaaactgctgccctacccgaccctggccagcccagcctctgactgacgcatgcccaataaactgaccccacaccaaaaaaaa

SEQ ID NO: 382 - DNA, 2589 bp, Homo Sapiens
gtttccctctgcgttcgctccgcgctgctggaggctgtcgtcccaatgctccccaaacggcggcgagcgcgggtcgggtcccctagcggcgatgccgcttcctccacgccgccctcgacgcgcttcccgggagtcgccatctacctggtcgagcctcgcatgggtcgcagccgccgggccttcctcacaggcctggcgcgctccaaaggcttccgcgtccttgacgcctgcagctccgaagcgacacatgttgtgatggaagagacctcagcagaggaggccgtcagctggcaggagcgcaggatggcagctgctcccccgggttgcacccccccagctctgctggacataagctggttaacagagagcctgggagctgggcagcctgtacctgtggagtgccggcaccgcctggaggtggctgggccaaggaaggggcctctgagcccagcatggatgcctgcctatgcctgccagcgccctacgcccctcacacaccacaacactggcctctccgaggctctggagatactggccgaggcagcaggctttgaaggcagtgagggccgcctcctcaccttctgcagagcagcctcggtgctcaaggcccttcccagccctgtcacaaccctgagccagctgcaggggcttccccactttggagaacactcctctagggttgtccaggagctgctggagcatggagtgtgtgaggaggtggagagagttcggcgctcagagaggtaccagaccatgaagctcttcacccagatcttcggggtcggtgtgaagactgctgaccggtggtaccgggaaggactgcgaaccttagatgacctccgagagcagccccagaaactaacccaacagcagaaagcggggctccagcaccaccaggacctgagcaccccagtcctgcggtccgatgtagatgccctgcagcaggtggtggaggaagctgtggggcaggccctgcctggggccaccgtcacgctgaccggcggcttccgcagggggaagttgcagggccatgacgtggacttcctcatcacccaccccaaggagggtcaggaggcggggctgctgcctagagtgatgtgccgcctgcaggaccagggcctcatcctgtaccaccagcaccagcacagctgctgtgagtcccctacccgcctggcccaacagagccacatggacgcttttgagagaagtttctgcattttccgcctaccacaacctccaggggctgctgtggggggatccacgaggccctgcccatcctggaaggccgtgagagtggacttggtagttgcacccgtcagccagttccctttcgccctgctcggttggactggctccaagcttttccagcgggagctgcgccgcttcagccggaaggagaagggcctgtggctgaacagccatgggctgtttgacccggagcagaagacatttttccaagcggcttcagaggaagacatcttcagacacctgggccttgagtaccttcctccagagcagagaaacgcctgaacctgcctgtgtcccccacttccactcaggaaattgggctgcccccaaactggccactgaatgtctccaagcaaatatgctgccccctgaccccaccttcaaccctccccgccaaggcctggctcttccggaggtcaattgtgcctgcaggatcagttgagcccctgctggtgtgctgcagggtgtgatgaggtgggagccctcagtgccagcctcatcactgtgtgaccctgggtctgctcttagcctccccatggctcacgttcctgccctggatgggatgtgagtggggcccacatcgtggagctgtggtggggcctgcagtcatgaatggcaagtggtccctgatgtgcagtgtctcattagttgcactgcagttaactgtggctcctgcagggcaccctgcccagaatgcccagaagagaaccatgcatacctgcactgcatttgagagccatgagctggaggctgtggttcgtgccagcaaggagcctactgtctggtgtgctgtaggcatctggagagggagagggcctgggtaggagctgggaggaagataattttcaactatggggcttcagtactgcagcgccccgaagccaggctctgtgcttctgcctttaaggcctgttctcagcacaatgtctcaaaaataggtcatatcctgccactcccgtcgcagagccctttaatggttccaaaccctaagtccacacatagcccctggctctggcatctctccagccccactggccccgagctgcttgactcaccggcttcctatttgatgcacccaggcccccttgtggccaactccctccccttctcactgaggcagaagcactgaggtgggctggacatgggtgccctccacgtccctcatatccccaggcacactctggcctcaggttttgccctggccatgtcatctacctggagtgggccctccccttcttcaggccttgaatcaaaagccactttgttaggcgaggatttcccagaccactcatcacattaaaaaatattttgaaaacatgcagtaaaaaaaaaaaaaaaaaa

SEQ ID NO: 383 - DNA, 890 bp, Homo Sapiens
ggcggaccgaagaacgcaggaagggggccggggggacccgcccccggccggccgcagccatgaactccaacgtggagaacctacccccgcacatcatccgcctggtgtacaaggaggtgacgacactgaccgcagacccacccgatggcatcaaggtctttcccaacgaggaggacctcaccgacctccaggtcaccatcgagggccctgaggggaccccatatgctggaggtctgttccgcatgaaactcctgctggggaaggacttccctgcctccccacccaagggctacttcctgaccaagatcttccacccgaacgtgggcgccaatggcgagatctgcgtcaacgtgctcaagagggactggacggctgagctgggcatccgacacgtactgctgaccatcaagtgcctgctgatccaccctaaccccgagtctgcactcaacgaggaggcgggccgcctgctcttggagaactacgaggagtatgcggctcgggcccgtctgctcacagagatccacgggggcgccggcgggcccagcggcagggccgaagccggtcgggccctggccagtggcactgaagcttcctccaccgaccctggggccccagggggcccgggaggggctgagggtcccatggccaagaagcatgctggcgagcgcgataagaagctggcggccaagaaaaagacggacaagaagcgggcgctgcgggcgctgcggcggctgtagtgggctctcttcctccttccaccgtgaccccaacctctcctgtcccctccctccaactctgtctctaagttatttaaattatggctggggtcggggagggtacagggggcactgggacctggatttgtttttctaaataaagttggaaaagca

SEQ ID NO: 384 - DNA, 2159 bp, Homo Sapiens
tctttccgtcccgggcagccagcgccagtcggagccagcgcgagcgccgccgccatcactgccgctgccaagtcctccacccgctgcccccgccatgtctgctaccgctgccacggccccccctgctgccccggctggggagggtggtccccctgcaccccctccaaacctcaccagtaacaggagactgcagcagacccaggcccaggtggatgaggtggtggacatcatgagggtgaacgtggacaaggtcctggagcgagaccagaagctgtcggagctggacgaccgtgcagatgcactccaggcgggggcctcccagtttgaaacaagcgcagccaagctcaagcgcaaatactggtggaaaaacctcaagatgatgatcatcttgggagtgatttgcgccatcatcctcatcatcatcatagtttacttcagctcttaaatccccgaggagtctgccctgcctagagaagggcctctcccccaaccctcagccgttcctccacctctcagccatatctttcagccccccctcccctggatccgtgtgtgtgtgtgtccgtgtgtgtgtccccctgtaaatagccagctgttatttatacatatataatattatatatatttggtctgtttgtagttttattactagatgatttttccggttgtccttaacaccccttcctgaggttcccttcacccctctctcttgccttccttccctttccctttcttcctgactagccccaagtcccttcatttgcatctgctatgcaatagtccctctcctttccttcttcttccctcagatttagctgatccttcctcccaccctggccttcctttcctctttcctcctcactctccccgtcatgctccctctgccccgccctcaaaaaaaaaaaaaaaaaaaaaaaaaaaaaaaaccaccagcacctgtccaggcttccttaggtacatcttctttgtatccattgggaggctctgagactggccccacttggtcctaaaaatcccaaggtctttgggagcgtccagcatgttaattagcgtatcattacatactgctatccctttccatttctttttgttccatcactcttctctcaacctgtgtttctttttttactgaggagttagtccccattagttcttgtatcacattttcatttgcacgacattactcgcaggtggtggggagcctgggcttttggggaaccaggctgctctggtccccagcattgcctcctcctagcccctctagtccagtttgcctcccttaccctcattttccaaacctcttgtaccctcctctccctcccccagtggtatgtaagtgtcttgaagttcagtatgttatgatggaccaataattctgcccttcgggtttctccctacattcctgctccccagttttcatgtggggtactcaactgacattcccatggggtttccctcccatctgcctgatccacctcctcctcccaccacaagatcaattgttggccacaattgatctcttgtagaggggtggctaccagtgtgtgtgtgggggtcatcactgccttggggaggagtggggcagggcagagaatccccccaattcctgcctgaaatctctggcctcacccctgctgggggttggactgaaaaccctcctccccaatttggggggtgttgccccatcactgcccagctcctctgactgccccccctgaatttagggtgggggtactagtcactgccaatgtgtgtatgggacttgctggaaaacggggatgcttgcccctctccaggactattgagcccagagagagctgtcctctcattgggtgaactgattgaggaagggtctattgtctttttaaatggcacaattttaagggtttgagggtacagtcccttaacctgccacgggagggggcccccaaactttcttcccccccacacttctggttttctgtgtggagggggagcagggatatctaagctgtggtgtgaaagggtaggagagatgctggaggtgggggtgctgtgttctagaccccccatattatcccagtgtcccctgcccccctcttcccccaccccatgcccccaattctgtggcgcatccagattgtgaaaatgtacaataaatgtgtaatgagtaaccaggt

SEQ ID NO: 385 - DNA, 2762 bp, Homo Sapiens
gggggggttggtgtcatggcagctgcggggagccgcaagaggcgcctggcggagctgacggtggacgagttcctagcttcgggctttgactccgagtccgaatccgagtccgaaaattctccacaagcggagacacgggaagcacgcgaggctgcccggagtccggataagccgggcgggagcccctcggccagccggcgtaaaggccgtgcctctgagcacaaagaccagctctctcggctgaaggacagagaccccgagttctacaagttcctgcaggagaatgaccagagcctgctaaacttcagcgactcggacagctctgaggaggaagaggggccgttccactccctgccagatgtgctggaggaagccagtgaggaggaggatggagcggaggaaggagaagatggggacagagtccccagagggctgaaggggaagaagaattctgttcctgtgaccgtcgccatggttgagagatggaagcaggcagcaaagcaacgcctcactccaaagctgttccatgaagtggtacaggcgttccaagcagctgtggccaccacccgaggggaccaggaaagtgctgaggccaacaaattccaggtcacggacagtgctgcattcaatgctctggttaccttctgcatcagagacctcattggctgtctccagaagctgctgtttggaaaggtggcaaaggatagcagcaggatgctgcagccgtccagcagcccgctctgggggaagcttcgtgtggacatcaaggcttacctgggctcggccatacagctggtgtcctgtctgtcggagacgacggtgttggcggccgtgctgcggcacatcagcgtgctggtgccctgcttcctgaccttccccaagcagtgccgcatgctgctcaagagaatggtggtcgtatggagcactggggaggagtctctgcgggtgctggctttcctggtcctcagcagagtctgccggcacaagaaggacactttccttggccccgtcctcaagcaaatgtacatcacgtatgtgaggaactgcgagttcacctcgcctggtgccctccccttcatcagtttcatgcagtggaccttgacggagctgctggccctggagccgggtgtggcctaccagcacgccttcctctacatccgccagctcgccatacacctgcgcaacgccatgaccacccgcaagaaggaaacataccagtctgtgtacaactggcagtatgtgcactgcctcttcctgtggtgccgggtcctgagcactgcgggccccagcgaagccctccagcccttggtctacccccttgcccaagtcatcattggctgtatcaagctcatccccactgcccgcttctacccgctgcgaatgcactgcatccgtgccctgacgctgctctcggggagctcgggggccttcatcccggtgctgcctttcatcctggagatgttccagcaggtcgacttcaacaggaagccagggcgcatgagctccaagcccatcaacttctccgtgatcctgaagctgtccaatgtcaacctgcaggagaaggcgtaccgggacggcctggtggagcagctgtacgacctcaccctggagtacctgcacagccaggcacactgcatcggcttcccggagctggtgctgcctgtggtcctgcagctgaagtcgttcctccgggagtgcaaggtggccaactactgccggcaggtgcagcagctgcttgggaaggttcaggagaactcggcatacatctgcagccgccgccagagggtttccttcggcgtctctgagcagcaggcagtggaagcctgggagaagctgacccgggaagaggggacacccttgaccttgtactacagccactggcgcaagctgcgtgaccgggagatccagctggagatcagtggcaaagagcggctggaagacctgaacttccctgagatcaaacgaaggaagatggctgacaggaaggatgaggacaggaagcaatttaaagacctctttgacctgaacagctctgaagaggacgacactgagggattctcggagagagggatactgaggcccctgagcactcggcatggggtggaagacgatgaagaggacgaggaggagggcgaggaggacagcagcaactcggaggatggagacccagacgcagaggcggggctggcccctggggagctgcagcagctggcccaggggccggaggacgagctggaggatctgcagctctcagaggacgactgaggcagcccatctggggggcctgtaggggctgccgggctggtggccagtgtttccacctccctggcagtcaggcctagaggctggcgtctgtgcagttgggggaggcagtagacacgggacaggctttattatttatttttcagcatgaaagaccaaacgtatcgagagctgggctgggctgggctggtgtggctgctgaagccccacagctgtgggctgctgaagtcagctccgcgggggagctgaccctgacgtcagcagaccgagaccagtcccagttccagggggaggcctgcaggcccctggccccttccaccacctctgccctccgtctgcagacctcgtccatctgcaccaggctctgccttcactcccccaagtctttggaaatttgttcttttcctttgaagtcacattttcttttaaaattttttgttttgcatccgaaaccgaaagaaataaagcggtgggaggcaggaaaaaaaaaaaaaaaaaaa

SEQ ID NO: 386 - DNA, 1982 bp, Homo Sapiens
gcggacgcgtgggctggaaacaacccaattgtctatcaacagtgactggaaggacaaattgtgctatgtccacacattagaataccagttggcagtcaaaaaggaagagctgatctgtgcagcaatttgagtctcagtaatttcatgtgaataaccctataccttccaatttgaaatcagaagcaaaaaaggctgccaaaatattaagagaattcacagaaataacttccagaaatggacctgataagatcattcctgctcacgtaattgcgaaggctaaaggccttgcaattctgtctgtgatcaaagccgggttcctggtgactgccagaggaggcagcgggattgtagtggcgcgccttccagatggaaaatggtctgcaccctcagccattgggatagctggccttggtggaggatttgaaataggaattgagacacatttacagctacatattccctctgagcattgccctggctgccttccataagtgtggagtgccactccagctttcttaggttgccatctgcatgacacatctttctccatccttttactgtcaatctaatggtatcagacttggtgataattctgaattatgaccgtgctgtagaagcttttgcaaaaggcggaaatctgaccctcggagggaacttgactgtggcggttgggcccttgggaaggaacttggaaggaaacgtggccctgagaagctccgctgccgtcttcacgtactgcaagtcaaggggactctttgcaggcgtgtctttagaagggagctgtttgattgaaaggaaagaaactaatagaaaattttattgtcaagatatccgagcttatgacattttatttggagatacaccgcggcctgctcaagccgaagatctttatgaaattcttgattcctttactgaaaagtatgaaaatgaaggacaacgaatcaatgcaagaaaagcagcaagggagcagaggaagtcttctgctaaagaattacctccaaagccattgtcaagaccacagcagtcatctgcaccagtccagctgaactctggctctcaaagcaacagaaatgaatataagctctatcctggactttccagctatcatgagagagttggcaatttgaatcaacccatagaagtgacagcgctgtattcatttgaaggacagcagcctggggatttgaattttcaagctggagacagaatcacagttatatcaaaaacagattcacattttgattggtgggaaggaaaacttcgaggtcaaactggcatttttccagccaactacgtaaccatgaattaaagcgtatactattttcttctttgagaattacaaaaaaattatttctacactgacaggatttactagttaagcaatgtttaatataaattttaaaaaacttctgttctacaaaatttccattccgtatgtaaaagattttgtttttctatataaaaagagctgactgacatatctttaaatactttgtactaactttatcacacttactgtgtcatagaatatcatacagtttatacgctcatagttctcttgtgaacacttcaaacatcgctaagcatttgatctggccatgtatatggtagctgtgttttaatttgagaatcttgagggtagagccacaaatttcaattcttacatttccatttgcaaagtgactagagaaaaagaaatcagcttaaatgaggtattaagtaatgtttagagttgtaggtattaactagaatataaatccttagaaattgtctttataccttcaaaaattatactatgcatttatcatagaaatgtgattacaaagaagtctgactaccatgtctttaaacatatggcatctctcaacttttcttccttatggggctacatttgttcatttccagcagtagcataaacttacggtgacatggtagacttgtctctaaataaaatttttaaatgttaaaaaaaaaaaaaaaaa

SEQ ID NO: 387 - DNA, 1370 bp, Homo Sapiens
ggcggcggcagctgtacagggcgggagaagcggtggtagcggaggctgtagtggggctggtggtgcttccaactgcgggacaggaagtggccgtagcggcttgttggataagtggaagatagatgataagcctgtaaaaattgacaagtgggatggatcagctgtgaaaaactctttggatgattctgccaaaaaggtacttctggaaaaatacaaatatgtggagaattttggtctaattgatggtcgcctcaccatctgtacaatctcctgtttctttgccatagtggctttgatttgggattatatgcacccctttccagagtccaaacccgttttggctttgtgtgtcatatcctattttgtgatgatggggattctgaccatttatacctcatataaggagaagagcatctttctcgtggcccacaggaaagatcctacaggaatggatcctgatgatatttggcagctgtcctccagtcttaaaaggtttgatgacaaatacaccttgaagctgaccttcatcagtgggagaacaaagcagcagcgggaagccgagttcacaaagtccattgctaagttttttgaccacagtgggacactggtcatggatgcatatgagcctgaaatatccaggctccatgacagtcttgccatagaaagaaaaataaagtagccaattctaaaagtagccctctttctcctggatcttgctgaattagtggcttggggggtgggggagataaaaagaacttaaaatgggtaaagtaagaaatgttaaaaagtccctgttttgtcctgaaattttagtctattctgggtaaataggattttctgacacagatatgagaagttgtagctctgatgtctagctgtagtctccttgatctgctgattgcattattttaatttgcttttctgggaaagcagttttgctaaaagctgtacagactttttcttttgtacctagcagtactttatatagtatagctttgggccatgtagcattttaagactcaattttaaaaaattattaatctgttgctgactcttaattcctatttcaatatgtgtttccttgaagaattcaggatacaacttcttgtgtatgacagctttccttcacacactatttttgtgggtgtgtatatatctgatttgggaagaatttaaaaaacacatagctttttaatttgtttgaaacagactttctgcctgttacatttttgcttttaaccaattaaagaagccaatggcattttagttttatattgtgttttccactagtatatccctgttgatttgtttgtgccttttattaactgccattttctaaaatttttttcaataaaaggaaggaagatgtg

SEQ ID NO: 388 - DNA, 5744 bp, Homo Sapiens
agcgcatggagccagaggaggaggatgaactaggctcagggcgggatgtggattccaactccaacgcggacagtgagaaatgggtggcaggagatggtttggaagaacaggaattttctatcaaggaggcaaacttcacagagggaagtctgaagctaaagattcagaccacaaagcgggctaagaaacccccaaagaatttggagaactatatatgtccacctgagatcaagatcaccatcaagcagtctggggaccagaaggtgtcccgtgctggaaaaaatagcaaagccacgaaggaggaagaaagaagccactccaaaaagaagctcctcacagccagtgaccttgcagccagtgacctcaaaggatttcagccacaggcttacgaaaggccccagaaacattcaactctccattatgacacgggcctcccacaggacttcaccggtgacaccttaaaaccaaagcaccagcaaaaaagcagcagccagaaccacatggactggtccaccaactctgacagcggacccgtcactcagaattgcttcatcagtccagagtctggcagagaaactgcaagcaccagcaagatccccgctcttgagcccgtggcttcctttgcaaaggcccagggtaagaaaggcagtgcagggaacacgtggagtcagttgtctaacaataacaaagatctgctcttgggaggtgtggctccatccccaagcagccacagctcaccagccccacccagcagctctgctgagtgcaacgggcttcagcccttggtggatcaagatggaggaggtacaaaggagcccccagaaccacctacggtgggcagcaagaaaaagtccagtaaaaaagatgtgataagtcagaccataccaaacccagacctggattgggtcaagaatgcccagaaagcatttgacaatacagaagggaaaagggaaggttattccgcagatagtgcccaagaggcatcaccagccaggcagaacgtgagttctgccagtaatcctgaaaatgactcaagtcatgtccggattactatccccatcaaggcaccctctctggatccaaccaaccataagaggaaaaaaagacagtccattaaagcggtggtggaaaagatcatgccagagaaagccttggcttctggaatcaccatgagcagtgaagtagttaacaggatactttccaactctgaggggaataagaaggatccccgtgtccctaagttgagtaaaatgatagagaatgagtccccctcagttggccttgaaactggtggaaatgctgagaaagttatcccaggaggtgtgtctaagccgcggaagccacccatggtcatgacacctccaacgtgcacagatcactctccatccagaaagctgccagaaatccagcatccaaaatttgctgcaaaacgaaggtggacttgcagcaaaccaaaacctagcaccatgcttcgagaggcagttatggccacctctgataaactgatgctggagcccccgtctgcatatcccatcaccccatccagccctctctacaccaacacagacagtcttactgtgatcactccagtcaaaaagaagcggggacgaccaaagaagcagcctttgctcacagtcgagacgattcatgagggaacttccaccagccccgtcagtcccatcagccgagagtttcctggcactaagaaaagaaagcgacgacgcaatttagcgaagttggcccagctagtgccgggagaggacaaacccatgagcgagatgaaatttcacaagaaagttggaaagctcggcgtgttggataagaagaccatcaaaactatcaataagatgaagacactcaagaggaaaaacatcttgaatcagatcttgtcctgttccagcagcgttgctctgaaggcaaaagctcccccagagaccagccctggggcagcagccattgaaagcaaactgggcaagcagattaatgtcagcaagaggggaaccatctacattggcaagaagcggggcaggaagccaagagcagagctgccacccccatccgaagaacccaaaacagccatcaagcaccccaggcctgtttctagccagccggatgttccagccgtgccttccaactttcagtcacttgtggcgtcttcaccagcagctatgcacccactttcaacacagttaggtgggtccaatggcaacctgagccctgccagcactgaaaccaatttttcagagttgaaaactatgccaaatctccagcccatcagtgctcttccaaccaaaacccaaaagggaatacacagtggaacctggaagctgtctccacccagactgatggccaactccccttcacacctgtgcgagattggctccctaaaggaaatcacgctgtcccctgtgagcgagtcccacagtgaggagacgatccccagcgacagcggcattgggacagacaacaacagcacttctgaccaagcggagaagagctcagaatcccgaaggaggtactcttttgatttctgctccctggacaacccggaggccattccgtccgacaccagcacaaagaaccggcatggccaccggcaaaagcatctcattgtggacaactttctggcccacgaaagcctcaagaagccaaagcacaagaggaaacggaaaagcctgcaaaaccgcgatgacctccagtttctggcagacctggaggagctaatcaccaagttccaagtgttcagaatctcccaccggagttacaccttctaccacgagaatccatatcccagcatttttcggattaattttgatcactattacccggtgccatatatccagtatgacccgttgctctatcttcgtaggacttcagacttgaagtcaaagaagaagcgtggtaggcctgcaaaaaccaatgacaccatgacaaaggtgccttttttacaagggttcagctaccctattcccagtggaagttactatgcaccctatggaatgccttacacatcaatgcctatgatgaaccttggttattacggtcagtacccagctcctttgtacctatcgcacacgcttggagcagcttccccattcatgaggccaacagtgccaccacctcagttccacacaaactcccacataaagatgtccggtgcagctaagcataaagccaagcatggagtacacctgcagggacctgttagcatgggccttggtgacatgcagccttctctgaaccctcccaaggtaggcagtgccagtctgtccagtggtcggctccataagaggaaacacaaacacaagcataagcacaaggaagaccggatcctagggacccatgacaacctgagtggtctttttgcaggcaaagccacaggcttctccagccacatcctgagcgagcggctgagtagcgcagacaaagagctcccgctggtgagtgagaagaacaagcataaggagaaacagaagcaccagcacagcgaagccggccacaaagcttctaagaacaactttgaggtggacaccctgtctacactgtcactttccgacgcccagcattggacacaggccaaggaaaaaggagacttgagcagtgagcctgtggactcatgcacgaaaagatactctggcagtggcggggatggtggcagcacgagatcggagaacctggacgtgttcagtgaaatgaacccttcgaatgacaagtgggacagtgacgtgagtgggagtaaaaggaggagctatgaaggctttggaacgtacagggaaaaggacatccaagccttcaagatgaaccgcaaggagagaagttcttatgactcctccatgtctccagggatgccaagtccccacttaaaagtggaccagacagcagtgcatagtaagaacgaaggctcagtgcccaccatgatgaccaggaagaagccagccgcagttgacagtgttacaattccaccagccccagtgttatctctccttgctgcatctgcagcaacgtcggatgcagtcggctcctccctgaagaagaggttcaagcggcgggagatcgaagccatccagtgcgaagtgcggaagatgtgcaactacaccaagatcctgtccaccaagaagaacctggaccacgtgaacaagatcctgaaggccaagcggctgcagagacaatcaaaaacaggcaacaacttcgtgaagaagaggcgcgggcgtcccaggaagcagcccacccagttcgatgaggactccagagaccaaatgccggtgctggaaaaatgcatcgacctgcccagcaaaagaggccagaagcccagcctgagcccgctggtgctggagcccgccgccagccaagacaccatcatggccaccatcgaggcggtcatccacatggcccgggaggcgccgcccctgcccccgccaccgccgccgcccctgccgccaccgccgccaccacccctgcccccgccaccccctctacccaagaccccccgaggcggaaagaggaaacacaaaccgcaggcccccgctcagcccccacagcagtcgcccccgcagcagccccttccccaggaagaggaggtgaaagccaaaaggcagaggaagtcccgagggagtgagagcgaggtccttccctagggcgggtctgggcgtctgcacctggggcctagggaactgacacgtgggaagcgcagtgagccggggcgggggcggaatcccccgctgcagggacacccacgcccttctctccagaagccgggcaggcagaatccggccagacgacggggctgagccatcaggagctcttgggaaagcaaagcagggagacaccttcagaagaagcttgtctgagcttcaccgcagctcccaccacgcggcgcttcagtacggctggatcctccgcaggcgagcggaaggcccccaggaggagcaggctggtggcactctcctgacctcacgctgccaaggtgcgccctcgactcccgatttcatttgctggccaggaaaatcgaaagggaaacaccctcaattaggaaacattccaaggggagaaaagctgcaaattgctcaactggcattgctgtaacccgttccatttaattggtttttatttcttttgattttcaagctctgctaagctttggggtaccaacgtcatcttcaggtgacctgaatctttcccttaaccgtacagtttctcgatggaattgtgtgatcagaaggtggaattctagtgataggcgacctcagacccgcattcatgttctgtgtgcctcttctattgcacatacactgatttttagcattgtctattcctatttttcctttgcccattgtacttccatatatcttttcattaacttacttgctgccttttttttttcttggtacacatttaaataaagtaatccttaacctgtgctgtaaagttcacccttggcatgctgttccaagaacctgggtttgaatcccaatcgttgtgaaacatactcagtattgataaaacctttttaataagtgatgcagagcagccaaggatatgttgacccagatgtcaaccaggctatttttatacttaaaacatgtcagcagagcataggcagaataaaatggtttaaataccccacagcaaatagagtaactgacaaaccaccaaaaactgaaaccccagacccaccagaaagacaagtgtctagcaatgccttggtacctgatctttttcattcaaataattgtcataggttgttc

SEQ ID NO: 389 - DNA, 5871 bp, Homo Sapiens
gcaccacagaccagtctgtcctggtgttggatgttaaaagtggagccacaaagaagccatcttatgtgggacaggcttgggtgtgagaccagagctgtgggtagcagcatgttgggtcaggatgaggggcagaggaaacactttccacctcttggatatggattttatcctgccctgattcaggagatccccatctattaagtaaggggaaagatgattttgttgtcttttgtttcagattctaatgtaggaactggtgagaagaaggtgactgaagcctggatttctgaggatgaaaactcacataggacgacgtcagacagactcacggtgatggagctcccctctcccgagtctgaggaagtccacgagcccagattaggggagctcttgggaaatccagaaggtcagagcctggggagttccccctctcaggacaggggctgcaagcaggtgacagtgacccattggaagatccagacaggagagacagctcaagtgtgcaccaagtcaggaagaaaccatattctgaactcagaccttcttctgcttcagagagagctcatagagggggaagccaatccttgcgatatctgtggcaaaaccttcacgtttaattcggacctagttaggcatcggatttcgcatgctggggagaaaccttacacgtgcgatcagtgtgggaaaggctttggccagagctcacaccttatggagcatcagagaattcacactggagagagactctacgtctgtaatgtgtgtgggaaagacttcattcactattcaggtctcattgagcatcagcgcgttcattcaggagaaaagcccttcaaatgtgcgcagtgtgggaaggcgttttgtcacagttcagacctgattaggcaccagagagttcacaccagagagagaccttttgaatgcaaagagtgtgggaaaggcttcagtcagagctccttacttattcgccatcagaggattcacacgggagaaaggccctatgagtgcaatgaatgtgggaaatccttcataaggagctcgagcctcattcgccattatcagatccacacagaagtgaaacagtatgaatgcaaagaatgtgggaaggcattccgtcatcgctcagaccttattgaacaccagagaattcacaccggagagagaccctttgaatgcaatgagtgtgggaaagcctttattcggagttcaaagctcattcagcatcagaggatccatactggggagaggccttacgtatgcaatgagtgtgggaagcgcttcagccagacgtcaaacttcacccagcatcagagaattcacactggagagaaactctatgaatgtaacgagtgtgggaaagctttctttctgagttcataccttattcgacaccagaaaatccacactggagagagagtgtatgaatgtaaggaatgtgggaaagcgtttctccagaaagcccatctcactgagcaccagaagatccactctggggacaggcccttcgaatgtaaagactgtgggaaagccttcatccagagctccaagctgcttctgcaccagattattcacactggagaaaagccctatgtgtgcagttattgtgggaaaggctttattcagaggtcaaacttccttcaacaccagaaaattcatactgaagagaagctctatgaatgtagtcagtatgggagagattttaactcaactacaaacgttaaaaataatcaaagggttcaccaagagggactctccttgagtaaggcccccatacatttgggtgagaggtctgtagataagggggaacacacaggtaacttataaaataattactttcccgcccagtgagtgatgtttggaaatgcgtggaattaggattcatgtggtttctaagatttggacatgtcagaattttgtgagtcatggatggggctgcttttgcagtgggtgccacctgccactgtgcagccctactcggctcagcccttctcctcagctgtgagcactgtcctcaggagagtcacagggcttgacacctgactctgagctggaacagtaggggcagggagaagacaggtctcaagaaaaggtttttaagaagtttcatccccagttaagcagagtccatccttgacttaaatcccttattacagcacaactgtgtatctaatcttacgatttaggagaatgttacctaggacattttgatgtgttaagttgaagaaaggtaactcgtgtatgaaccccgagccatttccctgttgtcctgaggaggaactccaggcctcccatcgtgtgccctaaggcctcctgcgtcctggagccctgcctcccactgcctgacttcctgccacacggttaatgctgcagcaacaccgactgcttcatcttccctgtgctccacgtggcttcctacctctctcgcctttgttcttgttgaagggtctcttctcagctaattaactctgaatcatggttcaagacaagcctcaggcatcatgtcaatgggtgtttccctcaagcttagttggcagcactctccacacttctgtggctcagtgattactgctattactatatttacttgcatatgtcagaatgatgtgatagactatctctgtcactatgctgttgggttcctgaggacagtgatcatatctgattgatttccatgtgtccactgtctagcacagggcaataaaaaatacacccctaaatctatgtgtaattggcatctctcttgctttgtcctttctatactgccattctaaaaattttcagctgttggctgtttttttttgttgtttgttcattttgtatcagtataatctacgattctgttagaagtatcttctcagccctgctactgtctgctgctcctacttagaagttgcaggcaatatcctgtgcacatccacgccctcctgtgtgccaccttacagctcatgcagaactgtctacttgatctggagggcattgacacctggctcagctggaacagtggggacaggaggaggcaggtctcaagagaaggtctttacttacttgtctgtatctttctgtctcactcgaaaggcacagtctcaatgcgctacgtaactcttctgttgtagcagttctgaggttgaactgagctcttgtcattttccatgctctctggctcattgtgtcatttcaaaatgtattgatatctataaggaatagtcctcaatgttgggaaaacagatgagcaacccactaccctgaagtcatccaccgtgtagtggggaagacggagatcacagtagggtgagttaagtatgtgccctcaggtgtgaaggagcacaggtgagggggtgcctgctgtggcacagagctgggaaggccttacagaagaggtgacatttcagctgggccagagatcagtagagagcagctgaagaagaaaatagggtccaggagaggaatctgcagaaacatggagccatgacagatggctttttggctaggactgttcgaaagcaggcgaggtaaatggacagtggacagccgcctcgccaaactgttagtctttacctctgaatttcatctggacatgaaccccaaagtccagttttgtaacgatataatttttttctcatgaggccatattttgagttcttaaatactaccaaccctgaacgtctcaggacaaataattcaaaaaagagatctacattttctggaaaatcagcattactagagatgtttcaaatgtagattttaccagaccattttaatcaactttattgagattcaattttcatatagtaaaacgcctatttaagtgtacaaggttttgaaaaatctatacacctgtgtaaccaccaccacctgtgtaaccaccaccgccagaaccaaaaacgtttctgtcacccaaagaagttcccttttgccttttcctagttaagcccactccagccccagataaccactttctatcctcatagattagtgttgcttggtttagagcctcatacaaatggattcatttactatgtgttcttttgcgtctgatgtctcactttggcatgtttttagactcatccaagctgttttgtgtttcagtagttctccttgctgaatagtattccattgtgtggataagccatcatttgtttattcatccacgtgttaatgggtttccagtctcggctcttaaaactatgagcatttgtgtaaaagtatgtatttgcacatgtgtttttatttctcttgggtaagtacctaggactttaattgctgtgttgtaagtgtcttagttcattcaggctgccataacaaaataccatcaactgggaggcttataaacaacagaaatttatgttttacagttctggaggctgggaagtccaagatgagggtgtcaacatttggtgtctagtgagggcctgcttccttttaagtagatgtctttttactgtgactgcacgtggtggaaagggactagcaagcttaccccattcatgagggctctccccttgtgattctgtcccctccccaagaccccacctcatatcatcttatgggttaggaatttgacatgaattgtgcaaggatgtaaacattcagtccattgcaatgcgtgtttctaacttcctaagaaattgtcacacagccctctgtagtggttgaatcattttacactattactacattatgggaagattccagttgctccatatctttgctaacacttggcattgtcagtctcttaaaatttaatccactctagcctccttatgattttaatttgtatttgcccactgaataatgtatgtctatgatttcatctgcttattgcttttccgtgtcgtcttttgtgatgtgtctgttcgtgccttttgcctgtttttaagttgggatgcttattgttgactcaagttctttccatattctgcatgaaaaacatacatgtaatatatagaattctttgtctccatttgtgacaaatattgtgaatattttcatgtttggtttgcctgttcattttcttaatggtgtcttttgaatattttttattaagccaccactcctggccaactgtagttgaactcaggtattggaagggcttccgttttgttcttttcccattttttttttttgacttctagatcctttgcattttcgtataaaatttgaagtcaacttctatcaacttcaggccaggcccgtggctcatgcctgtataatcccagcactttgggaggccgaggcgggcggatcgcttgaggtcaggagttcaagaccagcctggccggggtggtgaaaccccatctctactaaaaatgcggaagagttagccaggcgtggtggcaggcgcctgtagaatcccagctgctcgggaggctgaggcaggagaattgcttgagcctgggaggtggaggtttcagtgagctgggatcgtggcattgcactctagcctgggcaaccaagagtgaaactgtctcaaaaaacaacttttatcaatgtctgcaaaaagaaagtcttctgggatttatagatcaatttagggagaaatgacattttaacaattctgagttttccaattgttgaacatggtgtactgccccatttatttagatctgttaatttctctcagtttgcagctctcacattttgttaaattcatgtatttaatatttctgcatgctattgcaagtggtaaggttttcaaaaagctgttttctagttattgctagtatatagaaatgcattagacttgtacattgatcttgtatcaagcaacttagatcagttaacttattctagtagcttttttctagattctttagcattttctatgtagataatcatgtcatctgtgaataaagtattttacttttccaattt

SEQ ID NO: 390 - DNA, 1535 bp, Homo Sapiens
cctccgctcagtccgggagcgcacgtgggccgcggcgctccgacctccgctttcccaccgcccgcagctgaagcacatcccgcagcccggcgcggactccgatcgccgcagttgccctctggcgccatgtcgcagaacggagcgcccgggatgcaggaggagagcctgcagggctcctgggtagaactgcacttcagcaataatgggaacgggggcagcgttccagcctcggtttctatttataatggagacatggaaaaaatactgctggacgcacagcatgagtctggacggagtagctccaagagctctcactgtgacagcccacctcgctcgcagacaccacaagataccaacagggcttctgaaacagatacccatagcattggagagaaaaacagctcacagtctgaggaagatgatattgaaagaaggaaagaagttgaaagcatcttgaagaaaaactcagattggatatgggattggtcaagtcggccggaaaatattccccccaaggagttcctctttaaacacccgaagcgcacggccaccctcagcatgaggaacacgagcgtcatgaagaaagggggcatattctctgcagaatttctgaaagttttccttccatctctgctgctctctcatttgctggccatcggattggggatctatattggaaggcgtctgacaacctccaccagcaccttttgatgaagaactggagtctgacttggttcgttagtggattacttctgagcttgcaacatagctcactgaagagctgttagatcctggggtggccacgtcacttgtgtttatttgttctgtaaatgctgcgttcctaatttagtaaaataaaagaatagacactaaaatcatgttgatctataattacacctatgggatcaataagcatgtcagactgattaatgtctactgtgaaaatttggtagtaaattttcatttgatattagatataaatatctgaatataaataattttaatatactagtcatgatgtgtgttgtattttaaaaattatctgcaaccttaattcagctgaagtactttatatttcaaaagaatgaataacattgataataaaatcgctactttaaggggtttgtccaaaataaatattgtggccttatatatcacactattgtagaaagtattatttaatttaaatggatgcaggttgtctactaaagaaagattatatataactatgctaattgttcataatcaacagaaaccaagatagagctacaaactcagctgtacagttcgtacactaaactcttcttgcttttgcattataaggaattaagtctccgattattaggtgatcaccctggatgatcagttttctgctgaaggcacctactcagtatcttttcctctttatcactctgcattggtgaatttaatcctctcctttgtgttcaacttttgtgtgcttttaaaatcagctttattctaagcaaatctgtgtctactttaaaaaactggaaatggaaaaaaaaataaatctt

SEQ ID NO: 391 - DNA, 1967 bp, Homo Sapiens
gtggggtcgcgttgccaccccacgcggactccccagctggcgcgcccctcccatttgcctgtcctggtcaggcccccaccccccttcccacctgaccagccatgggggctgcggtgtttttcggctgcactttcgtcgcgttcggcccggccttcgcgcttttcttgatcactgtggctggggacccgcttcgcgttatcatcctggtcgcaggggcatttttctggctggtctccctgctcctggcctctgtggtctggttcatcttggtccatgtgaccgaccggtcagatgcccggctccagtacggcctcctgatttttggtgctgctgtctctgtccttctacaggaggtgttccgctttgcctactacaagctgcttaagaaggcagatgaggggttagcatcgctgagtgaggacggaagatcacccatctccatccgccagatggcctatgtttctggtctctccttcggtatcatcagtggtgtcttctctgttatcaatattttggctgatgcacttgggccaggtgtggttgggatccatggagactcaccctattacttcctgacttcagcctttctgacagcagccattatcctgctccataccttttggggagttgtgttctttgatgcctgtgagaggagacggtactgggctttgggcctggtggttgggagtcacctactgacatcgggactgacattcctgaacccctggtatgaggccagcctgctgcccatctatgcagtcactgtttccatggggctctgggccttcatcacagctggagggtccctccgaagtattcagcgcagctcttgtgtaaggactgactacctggactgatcgcctgacagatcccacctgcctgtccactgcccatgactgagcccagccccagcccggggtccattgcccacattctctgtctccttctcgtcggtctaccccactacctccagggttttgctttgtccttttgtgaccgttagtctctaagctttaccaggagcagcctgggttcagccagtcagtgactggtgggtttgaatctgcacttatccccaccacctggggacccccttgttgtgtccaggactccccctgtgtcagtgctctgctctcaccctgcccaagactcacctcccttcccctctgcaggccgacggcaggaggacagtcgggtgatggtgtattctgccctgcgcatcccacccgaggactgagggaacctaggggggacccctgggcctggggtgccctcctgatgtcctcgccctgtatttctccatctccagttctggacagtgcaggttgccaagaaaagggacctagtttagccattgccctggagatgaaattaatggaggctcaaggatagatgagctctgagtttctcagtactccctcaagactggacatcttggtctttttctcaggcctgagggggaaccatttttggtgtgataaataccctaaactgcctttttttcttttttgaggtggggggagggaggaggtatattggaactcttctaacctccttgggctatattttctctcctcgagttgctcctcatggctgggctcatttcggtccctttctccttggtcccagaccttgggggaaaggaaggaagtgcatgtttgggaactggcattactggaactaatggttttaacctccttaaccaccagcatccctcctctccccaaggtgaagtggagggtgctgtggtgagctggccactccagagctgcagtgccactggaggagtcagactaccatgacatcgtagggaaggaggggagatttttttgtagtttttaattggggtgtgggaggggcggggaggttttctataaactgtatcattttctgctgagggtggagtgtcccatccttttaatcaaggtgattgtgattttgactaataaaaaagaatttgtaaaaaa

SEQ ID NO: 392 - DNA, 2909 bp, Homo Sapiens
cagcctgcgccggggaacatcggccgcctccagctcccggcgcggcccggcccggcccggctcggccgcctcagacgccgcctgccctgcagccatgaggcccccgcagtgtctgctgcacacgccttccctggcttccccactccttctcctcctcctctggctcctgggtggaggagtgggggctgagggccgggaggatgcagagctgctggtgacggtgcgtgggggccggctgcggggcattcgcctgaagacccccgggggccctgtctctgctttcctgggcatcccctttgcggagccacccatgggaccccgtcgctttctgccaccggagcccaagcagccttggtcaggggtggtagacgctacaaccttccagagtgtctgctaccaatatgtggacaccctatacccaggttttgagggcaccgagatgtggaaccccaaccgtgagctgagcgaggactgcctgtacctcaacgtgtggacaccatacccccggcctacatcccccacccctgtcctcgtctggatctatgggggtggcttctacagtggggcctcctccttggacgtgtacgatggccgcttcttggtacaggccgagaggactgtgctggtgtccatgaactaccgggtgggagcctttggcttcctggccctgccggggagccgagaggccccgggcaatgtgggtctcctggatcagaggctggccctgcagtgggtgcaggagaacgtggcagccttcgggggtgacccgacatcagtgacgctgtttggggagagcgcgggagccgcctcggtgggcatgcacctgctgtccccgcccagccggggcctgttccacagggccgtgctgcagagcggtgcccccaatggaccctgggccacggtgggcatgggagaggcccgtcgcagggccacgcagctggcccaccttgtgggctgtcctccaggcggcactggtgggaatgacacagagctggtagcctgccttcggacacgaccagcgcaggtcctggtgaaccacgaatggcacgtgctgcctcaagaaagcgtcttccggttctccttcgtgcctgtggtagatggagacttcctcagtgacaccccagaggccctcatcaacgcgggagacttccacggcctgcaggtgctggtgggtgtggtgaaggatgagggctcgtattttctggtttacggggccccaggcttcagcaaagacaacgagtctctcatcagccgggccgagttcctggccggggtgcgggtcggggttccccaggtaagtgacctggcagccgaggctgtggtcctgcattacacagactggctgcatcccgaggacccggcacgcctgagggaggccctgagcgatgtggtgggcgaccacaatgtcgtgtgccccgtggcccagctggctgggcgactggctgcccagggtgcccgggtctacgcctacgtctttgaacaccgtgcttccacgctctcctggcccctgtggatgggggtgccccacggctacgagatcgagttcatctttgggatccccctggacccctctcgaaactacacggcagaggagaaaatcttcgcccagcgactgatgcgatactgggccaactttgcccgcacaggggatcccaatgagccccgagaccccaaggccccacaatggcccccgtacacggcgggggctcagcagtacgttagtctggacctgcggccgctggaggtgcggcgggggctgcgcgcccaggcctgcgccttctggaaccgcttcctccccaaattgctcagcgccaccgcctcggaggctcccagcacctgcccaggcttcacccatggggaggctgctccgaggcccggcctccccctgcccctcctcctcctccaccagcttctcctcctcttcctctcccacctccggcggctgtgaacacggcctcttcccctacggccacaggggcccctcctctaatgagtggtcggaccgtggggaagggccccactcagggatctcagacctagtgctcccttcctcctcaaaccgagagactcacactggacagggcaggaggagggggccgtgcctcccacccttctcagggacccccacgcctttgttgtttgaatggaaatggaaaagccagtattcttttataaaattatcttttggaacctgagcctgacattggggggaagtgggaggccccggacggggtagcaccccccattggggctataacggtcaaccatttctgtctcttctttttcccccaacctccccctcctgtcccctctgttcccgtcttccggtcattcttttctcctcctctctccttcctgctgtccttctccggccccgcctctgccctcatcctccctctcgtctttcgcacattctcctgatcctcttgccaccgtcccacgtggtcgcctgcatttctccgtgcgtcctccctgcactgaaacccccccttcaacccgcccaaatgtccgatccccgaccttcctcgtgccgtcctcccctcccgcctcgctgggcgccctggccgcagacacgctcgacgaggcggagcgccagtggaaggccgagttccaccgctggagctcctacatggtgcactggaagaaccagttcgaccactacagcaagcaggatcgctgctcagacctgtgaccccggcgggacccccatgtcctccgctccgcccggccccctagctgtatatactatttatttcagggctgggctataacacagacgagccccagactctgcccatccccaccccaccccgacgtcccccggggctcccggtcctctggcatgtcttcaggctgagctcctccccgcgtgccttcgccctctggctgcaaataaactgttacaggcc

SEQ ID NO: 393 - DNA, 3655 bp, Homo Sapiens
ccggcttttgcgctgggagcccagagcaggaggcagagcccgcgggaagctcggagcactcaggacgccgcgcgcccttccccgccctccctgaccagggagcagctcgctccaggcgcccagccgaggcccccagcccagtgggagcaagtcatagagaacaattcgagagacagagagacggagcgcgctttcctgctcagtcctgaaaagtgagccgctcccgggtttgcaacctcaagcttcgcagcagcggcggcggcggctgccgggaaggaggcaggtgcaggtgcaggagggaggcggctctgggctccgcgcctgggtcttggccatggcctcggtcctggggagcggcagagggtctggagggctgagcagtcaactcaaatgcaagtccaagaggaggaggaggcggaggtccaagcggaaagataaagtaagcatattgtcaaccttcctcgctcctttcaagcacctgagtcctggcatcacaaacacggaggatgacgacaccctcagtaccagcagcgcggaggtgaaggagaaccgcaacgtgggcaacctggccgcgcggccaccgccctccggggaccgggcccggggcggcgcgcccggcgcgaagaggaagcggccgctggaggaggggaatgggggccacttgtgcaaactgcagctggtctggaagaagctgtcgtggtcggtggcgcccaagaacgcgctggtgcagctgcacgagctgaggccgggcctgcagtaccggacagtgtcgcagacgggcccggtgcatgccccggtcttcgcggtagcggtggaggtgaacgggctcacgttcgagggcacaggccccaccaagaagaaggccaagatgcgcgcggcggagctggcactcaggtccttcgtgcagttccccaacgcctgccaggcgcacctggccatgggcgggggcccgggccccggcacggacttcacctccgaccaggccgatttccccgacacgctcttccaggagttcgagcccccggcgccgcgccccggactcgcgggaggccgccccggggacgccgcgcttctgtccgcggcctacgggcgacggcggctgctgtgccgcgcgctggacctggtgggcccgacccccgccacccccgcggccccgggcgagcgcaaccccgtggtgctgctgaaccgcctgcgcgccgggctgcgctacgtgtgtctggcagaaccggccgagcggcgcgcgcggagcttcgtgatggccgtgagcgtggacggcaggacgttcgagggctcggggcgcagcaagaagctggcccggggtcaggccgcgcaggccgcactgcaggagctgttcgacatccagatgcccggccacgcgcccggcagggccaggaggacgccaatgccgcaggaattcgcagactccatatcccagctggtcacacagaagttccgcgaggtgacgacggacctcacgcccatgcacgcccgccataaagcgctggcaggaatcgtcatgaccaaaggcctggatgctcggcaggcgcaggtcgtggccctgtcctcggggaccaagtgcatcagcggcgagcacctcagtgaccaggggctggtggtgaatgactgccacgcggaggtcgtggcccggcgggcgttcctgcacttcctctacacgcagctggagctgcacctgagcaagcggcgcgaggactcagagcgatcgatattcgtgcggttaaaagaaggtggctaccggctgcgagagaacatcctcttccatctctacgtgagcacctccccctgtggagacgcaagactccactctccctacgagatcaccacagacctgcacagcagcaaacacctcgtcaggaagttccgcgggcacctgcgcaccaagatcgagtccggggaagggacggtccccgtgcgtggccccagcgcagtgcagacctgggacggcgtcctgctgggggagcagctgatcaccatgtcctgcacggacaagatcgccaggtggaacgtcctggggctgcagggcgcgctcctgtcccacttcgtggagcccgtgtacctgcagagcatcgtggtgggcagcctgcaccacacgggccacctcgcacgcgtcatgagccaccgcatggagggtgtcggccagctgcccgcctcctaccggcacaaccggcctctcctcagcggcgtgagtgacgccgaggcgcgccagccggggaagtcgccccccttcagcatgaactgggtcgtgggcagcgcggacctggagattatcaacgccaccactgggcggaggagctgtgggggcccatcccggctctgcaagcacgtgctgtctgcacggtgggcgcggctgtatggcaggctgagcacacggacacccagccctggagacacgccctccatgtactgtgaggccaagctgggggcgcacacctaccagtctgtgaaacagcagctgttcaaggcctttcagaaggctggcctgggcacctgggtgaggaaaccaccggagcagcagcagtttctactgactctctaggctgcgggctcctggctgctggagctgagcgggacgctggagggatgggaccgtgtctggggggcgacgtggcgggtcggccggttccctgcattcgttttactttggtgtcccagaaacacgcgagtgtgcaatgtttggacgagcaacaacacaaattcagaacgtgcctctttccagatcgctggccccagaaccctgtcccccacacccaggggcacacgcaccgttgagttagcgccgactcttcctgtggagtctgagggaggggctccattcaggcaaaggggttttagctgcagccttggaaggaggcaccgacacgacaccaggcaggagtgagcctcaggccccgtccctgcaccccacccctgcgtgcgcctcttggtgatgctggggtctcactagcttgagggggcacatgaagataagccacaaatgaagagaaaagccatgcccaccccagccccagagaaaccaataagaatcctctattattttcactattcgtttaggtttttatactccacctcctttcaaaaaagatttaagatgtacgacattaccgaacacctaaaatagaaccagagaaacgaaagccattcccacaaagtgaaggaacagtttccaaaacccctgcgaggcagagttaagacctgtgacgtggggagcctggaaacacctggcccacgcgtgctgcagatgtggggagcctggaaacacccggcccacgcgtgctgcagatgtggggagcctggaaacacccggcccacgcgtgctgcagatgtggggagcctggaaacacccggcccacgcgtgctgtagatgtggggagcctggaaaaacctggcccacgcgtgctgcagatgtggggagcccggaaacacctggcccatgcctgttcagtccgtcatggcgtttggtttatggtggccgatactaagagccactgaggtctgggttgtgtgagggttagctaccaccctataacctccctaccaggtaataaggagaccaagtctttgatcaaattctgattttttaactaaattttcattagaaagcaagcacaaaataaaatcaaaacaacctttaccttca

SEQ ID NO: 394 - DNA, 2833 bp, Homo Sapiens
tgaattagaagattttccagtacttggaattgactgtgagtgggtaaatttggaaggcaaagccagccctctgtcacttctacaaatggcctccccaagtggcctgtgtgtcttggttcgcctgcccaagctaatctgtggaggaaaaacactaccaagaacgttattggatattttggcagatggcaccattttgaaagttggagtgggatgctcagaagatgccagcaagcttctgcaggattatggcctcgttgttagggggtgcctggacctccgatacctagccatgcggcagagaaacaatttgctctgtaatgggcttagcctgaagtccctcgctgagactgttttgaactttccccttgacaagtcccttctacttcgttgcagcaactgggatgctgagactctcacagaggaccaggtaatttatgctgccagggatgcccagatttcagtggctctctttcttcatcttcttggataccctttctctaggaattcacctggagaaaaaaacgatgaccacagtagctggagaaaagtcttggaaaaatgccagggtgtggtcgacatcccatttcgaagcaaaggaatgagcagattgggagaagaggttaatggggaagcaacagaatctcagcagaagccaagaaataagaagtctaagatggatgggatggtgccaggcaaccaccaagggagagaccccagaaaacataaaagaaagcctctgggggtgggctattctgccagaaaatcacctctttatgataactgctttctccatgctcctgatggacagcccctctgcacttgtgatagaagaaaagctcagtggtacctggacaaaggcattggtgagctggtgagtgaagagccctttgtggtgaagctacggtttgaacctgcaggaaggcccgaatctcctggagactattacttgatggttaaagagaacctgtgtgtagtgtgtggcaagagagactcctacattcggaagaacgtgattccacatgagtaccggaagcacttccccatcgagatgaaggaccacaactcccacgatgtgctgctgctctgcacctcctgccatgccatttccaactactatgacaaccatctgaagcagcagctggccaaggagttccaggcccccatcggctctgaggagggcttgcgcctgctggaagatcctgagcgccggcaggtgcgttctggggccagggccctgctcaacgcggagagcctgcctactcagcgaaaggaggagctgctgcaagcactcagagagttttataacacagacgtggtcacagaggagatgcttcaagaggctgccagcctggagaccagaatctccaatgaaaactatgttcctcacgggctgaaggtggtgcagtgtcacagccagggtggcctgcgctccctcatgcagctggagagccgctggcgtcagcacttcctggactccatgcagcccaagcacctgccccagcagtggtcagtggaccacaaccatcagaagctgctccggaaattcggggaagatcttcccatccagctgtcttgatagctgctttcctcccagttaggacaagtgggaagctggagccaaggttgaagagtcacctcttcccattttagtacatcattaattgtcaaagcctgtgtgacacaactcagaatactaacctagactaatcccaggatgcttctgctggagcaaagatattgtttgaaggagagtttatggttttggattttaaacgggcagggtcttttttcctctcatttttgtggacaagagaggccttcgcctttatttttactctccctcttctgctgtccctgtgcagaggaaaaatgaagaattctcccagaagtgacttgtcaagacttaaaaaaaatgtttttaatgcatttcttccttgtctagtgcctcggtttatctctaacaggggctgtccagtatatcggtcctgttaggaggggagaaaaagttcttccaaaggctggagaagtgaacaaggagtcaaatttattttcccaattcaacttcataattatcatttccttggcttcatgctctcccgtaactcatgtggttgggatccatcccatctgggtcacttcagtctacttcacgtacttgaaaaggctttcctttacacttccaggaccaaacagcaacttcctgccacacacttccaccctatcactgggagaaatccttttctggacatgagcctttgacctgggtggggcagaaagaaccacaaactccatctcccaatagaactttgaaattcactcagcttttcctttcatgctgtttgttgcctgcttgttgcactcctcctgccccagaactgcaagatttttagcttcacccctttctgagagtaatgttatcttttatcagaatcagtatcagttcccctgtattctgtgcttcatcgaatttgcaagactgacctcttttaagcatttaattcactcccagagtcatctggtcaggttgcaatatgaggacttctctgtctcctctgaagcctgggacactgagcttacttaatacattagatgttcaaaagaggagcgttgtttcatctttcaaaatgttaggccattactttgagtataaaatcgacttattaatgattagtaatttttctaaagtattgggaaaactttcttattttataagatcttaacaagcttaaaaaagaattttatgaccagaatccaacaagagctctattttggaattgtgcccaagttggtgatgtttactctaaaattaataataaaactacttgtaagcaac

SEQ ID NO: 395 - DNA, 1702 bp, Homo Sapiens
gagggagagctggggcctgctcccggagagatacggctatgtcgatcgaaatcgaatcttcggatgtgatccgccttattatgcagtacttgaaggagaacagtttacatcgggcgttagccaccttgcaggaggagactactgtgtctctgaatactgtggacagcattgagagttttgtggctgacattaacagtggccattgggatactgtgttgcaggctatacagtctctgaaattgccagacaaaaccctcattgacctctatgaacaggttgttctggaattgatagagctccgtgaattgggtgctgccaggtcacttttgagacagactgatcccatgatcatgttaaaacaaacacagccagagcgatatattcatctggagaaccttttggccaggtcttactttgatcctcgtgaggcatacccagatggaagtagcaaagaaaagagaagagcagcaattgcccaggccttagctggcgaagtcagtgtggtgcctccatctcgtctcatggcattgctgggacaggcactgaagtggcagcagcatcagggattgcttcctcctggtatgaccatagatttgtttcgaggcaaggcagctgtcaaagatgtggaagaagaaaagtttcctacacaactgagcaggcatattaagtttggtcagaaatcacatgtggagtgtgctcgattttctccagatggtcagtatttggtcactgggtctgttgatggattcattgaagtatggaactttactactggaaaaatcagaaaggatcttaagtaccaggcccaagataactttatgatgatggatgatgctgtcctctgcatgtgtttcagcagagatacagaaatgttagcaactggggcccaagatggaaaaatcaaggtgtggaagattcagagtggacaatgtttaaggagatttgagagggcacacagtaagggtgtcacctgtctaagcttttctaaggatagcagtcagatccttagtgcttcttttgaccagacaattagaattcatggtttaaaatctgggaaaaccctgaaggaatttcgtggccattcctcctttgttaacgaagcaacatttacacaagatggacattacattattagtgcatcctctgatggcactgtaaagatctggaatatgaagaccacagaatgttcaaatacctttaaatccctgggcagcaccgcagggacagatattaccgtcaacagtgtgattctacttcctaaaaaccctgagcactttgtggtgtgcaacagatcaaacacggtggtcatcatgaacatgcaggggcagattgtcagaagcttcagttctggtaaaagagaaggtggggactttgtttgctgtgccctctctccccgtggtgaatggatctactgtgtaggggaggactttgtgctctactgtttcagtacagtcactggcaaactggagagaactttgacagtgcacgagaaggatgtgattggtattgcacatcaccctcatcagaacccgattgctacctacagtgaagatggactcctaaagctctggaaaccataattcaacttttctttttaaatcagctcgaaagcatgtacttaaatgaagcatattcatgtaatgtgcttttttttttttttgccagcttttctaagcaaatagattgtctgaattagtcacag

SEQ ID NO: 396 - DNA, 2773 bp, Homo Sapiens
atgtgatgcatgctcacgtgtctccgcagccggctcgggaaagaatcccccaagctccatttcatgagtaagcgtgagagccgctcagtttcctccagctctgctgaagccagcacagaagtagcccaaactcttccctctgctgacagcaaattttaggcaaagtcttgagaaagaagaaattgggtccagaaagggaagtgaggagaatcagatcccagacctttggggagaaggagcaaccgcctctggcacagcccatcagggagaaagagcaggttgagaagagtcctaagctaacagccccaaacaggtgggtgttgctcagctccctgaggcatgtggttgtaaggcagaacccacagaccttgcaggaagaaggctctcggggccatggcccaggtcagcatcaacaatgactacagcgagtgggacttgagcacggatgccggggagcgggctcggctgctgcagagtccctgtgtggacacagcccccaagagtgagtgggaagcctctcctgggggtctggacagaggcaccacttccacacttggggccatcttcatcgtcgtcaacgcgtgcctgggtgcagggttactcaacttcccagcagccttcagcactgcggggggcgtggcagcaggcatcgcactgcagatgggtatgctggttttcatcatcagtggccttgtcatcctggcctactgctcccaggccagcaatgagaggacctaccaggaggtggtatgggctgtgtgtggcaagctgacaggtgtgctatgtgaggtggccatcgctgtctacacctttggcacctgcattgccttcctaatcatcattggcgaccagcaggacaagattatagctgtgatggcgaaagagccggagggggccagcggcccttggtacacagaccgcaagttcaccatcagcctcactgccttcctcttcatcctgcccctctccatccccagggagattggtttccagaaatatgccagcttcctgagcgtcgtgggtacctggtacgtcacagccatcgttatcatcaagtacatctggccagataaagagatgaccccagggaacatcctgaccaggccggcttcctggatggctgtgttcaatgccatgcccaccatctgcttcggatttcagtgccacgtcagcagtgtgcccgtcttcaacagcatgcagcagcctgaagtgaagacctggggtggagtggtgacagctgccatggtcatagccctcgctgtctacatggggacaggcatctgtggcttcctgacctttggagctgctgtggatcctgacgtgctcctgtcctatccctcggaggacatggccgtggccgttgcccgagccttcatcatcctgagcgtgctcacctcctaccctatcctgcacttctgtgggcgggcggtggtggaaggcctgtggctgcgctaccagggggtgccagtggaggaggacgtggggcgggagcggcggcggcgagtgctgcagacgctggtctggttcctgctcaccctgctgctggcgctcttcatccctgacatcggcaaggtgatctcagtcattggaggcctggccgcctgcttcatcttcgtcttcccagggctgtgcctcattcaagccaaactctctgagatggaagaggtcaaaccagccagctggtgggtgctggtcagctacggagtcctcttggtcaccctgggagccttcatcttcggccagaccacagccaacgccatctttgtggatctcttggcataaccactgcctcccagggaacacaaggcctttgccattggtcgcaggaacccatctcttagagctatggggccattcttagtccacgatcattccaactggtgggatgacatccggacatcctcttccagggactggggcaaactcaggccccacacctctggacagctcaaatccagtccccttcctgctccccagtcctggcagtgccgtggatggcggcaggaagtctcacatcatagaggacccctcctcctctcccagttctcaacttctccatgcctggaatccacgggtgaagagagtcggtagatctcataagaaagaatccagtctgacttccctctggagaatgactatggacagaaggccaccatcctccacagagcaccctgtcctgagtaggggttgtgctcattaccccaggccagtggtagcttcctcaggagcctggccacttccaaaggtagcactgaagtcgtgcaaatacatagtcaggtagattcagaccttgtccacaccttcctgggcaacccccaccatgaacctgtcagcctctttcccatagctaatagacatttcccaggccttgaggggccccaccctgtctctttcatcaaacctgatggtccaggctgggcatccctctcctcctccatccccagacatcaccaggtctaatgtttacaaacggtgccagcccggctctgaagccaagggccgtcccgtgccacggtgctgtgagtattcctccgttagctttccccataaggttgggagtatctgcttttgtgtctgagatgggcccctcttttcagaggccgcagggtgggtgatggagaaggctgagaacctttcagaccctctgtgtgggctgggctggtcagaatcagggtgtacctccccgacaccttctttttcagtgatgttttctcttctccctgcctttcctctgcctcctcccctgccagccctagcgtgactacccagagac

SEQ ID NO: 397 - DNA, 2880 bp, Homo Sapiens
actccagtctcctgggactttgactcgccgtactcggcgcgctcctgctgagggtcgccggagatgtcgctcggccgccttctaccaggagcctgatccgtgccgcccgccgcccggatgggaccaccagagtgctctaagtctccagtgaatattgaattgctgaggattttgggaaaagacaaatcaaagttcccattccatggatcccttaggtgcaccttcccagtttgtggatgtggatacactaccaagctggggtgactcatgccaagatgaattaaattcctctgatactacagctgaaatatttcaggaagacactgttcgatcaccttttctttataataaggacgtcaatggaaaagtggttctttggaaaggagatgtggcattactgaactgtacagccattgtgaataccagcaatgaaagtctcacagataagaatcctgtgtcagaaagtatcttcatgcttgcagggcctgatttgaaggaagatctccagaaacttaaagggtgccgaacaggtgaagcaaaattgacaaaaggattcaatctagctgcccggttcatcattcacacagtgggacctaaatataaaagccgctatcgcacagcagctgagagttccctttatagctgctacagaaacgtacttcaactagcaaaagagcagtcaatgtcttctgttggcttctgtgtcatcaattctgcaaaacgtggttatcctttagaggatgcaacacacatagcacttcgcactgtaagaagattcctagagattcatggggaaaccattgaaaaagtagtatttgctgtctctgatcttgaagagggtacttaccaaaagctgctacctctctacttcccaaggtcattaaaagaggagaatcgatcattgccctacctacctgcagatattggaaatgcagaaggggagcctgtggtacctgaacgacagattagaataagtgagaaacctggtgctccagaagataaccaagaagaggaggatgaaggcttgggagttgatctctctttcattggctctcatgcttttgctcgaatggaaggagatattgacaagcaaagaaaactgatccttcagggacaattatcagaggcagctctgcagaagcagcatcaaagaaattataatcgctggttatgtcaagcaagatctgaggatctgtctgatattgcttctctaaaagccttataccaaacaggtgttgataactgtggtcggacagtgatggtggtagttggaagaaacattcctgtaacattaatagatatggacaaggctctcttatatttcattcatgtaatggatcacattgctgtgaaggagtatgtattagtgtattttcacaccctgaccagcgaatacaatcacctggactccgacttcctgaagaaactctacgatgttgttgatgtcaagtacaagaggaatttgaaggctgtttattttgtacatcccacatttcgttcaaaggtgtcaacatggttttttaccaccttttctgtctcaggactgaaggacaaaatccaccatgtggacagcctccaccagctgttttctgccatatcaccagaacagattgactttcctccttttgtccttgaatatgatgccagggaaaacgggccttactatacatcatatcccccatcaccagatttgtgacctgccatctttcagtgcttcttggttcccaggatgccacttcctccacgaatagctacctgttgaagtgatattcattgttgctgtacagatccagagagccttttgtccccacctctctggtatttttttattgactgtatattttctggcacataagcaatctaaaaatggtaggccattctgaactgcacacattttaaatttgtatatttatatgaaatggaaatgttcatttttagattgttaatagaaattggggagcaacttttgagtatctttagtttcctgaaggacaccgaattctccattagataaaccaccaagactgttcacatcatctctctaacattgcacgcttcctttgtgtacttaagtgattctcgaaatatacagaaccaatgtatgctaaccagatgcattgtttgcttcagatccatggtgttaataccatgtatattttataaagataatttggctgtgttaaaagagaattacctgagtccaagaatgtggaaatgtatctgacaaaaaacatcaaaatcattagcaaaacataggacttagaatgttaatgtacaagttaagactaaagtttaaggactaaggttccttggattatatgacttgttaagattgccacagttccgatctcaacagtgtggggtgaaacaagaagactgtatcttcagcctttttcctataatcatggatgatttggtcttattcaaaaggaccgcacatattagtactcttaagagcatcttccaagactccagcagtgagcatttagagagtgtgttgtcttccagagtcatgaatgattttgtttagctatcaggtctactacctctaaggacatttcatagcagcatctcttgagttgcctgcatcagtgtggaggaagtgtgtcacagtgaacaaatccagggagctgataattggcaaaagaccacttttaccactcaggctctatttgtgccttagcttggttatgagtaaaaattagaattatgctgcctacctcacagaggtatcatgaagatagcatttagaaagggctttgttgtggtggggtatcttcagttagtttttaaatgggaataaatatatatgagggaatgctacacagcactcctcttgtccttgatccccaaaaaaaaaaaaaaaaaaaaaaaaaaaaa

SEQ ID NO: 398 - DNA, 1598 bp, Homo Sapiens
agctgcggcgctgggctggcggcggcgagtccacgtgctccccgcggccggttgaaaccgttggcgggcgctggctgagaggcaatgtttgctgtcttccattggagtgactgaatttctacatgacggctttttgacaagacttaaaacctgtcttggatagagaatatttagccatttacctaaaaatggtattttttacatgcaatgcatgtggtgaatcagtgaagaaaatacaagtggaaaagcatgtgtctgtttgcagaaactgtgaatgcctttcttgcattgactgcggtaaagatttctggggcgatgactataaaaaccacgtgaaatgcataagtgaagatcagaagtatggtggcaaaggctatgaaggtaaaacccacaaaggcgacatcaaacagcaggcgtggattcagaaaattagtgaattaataaagagacccaatgtcagccccaaagtgagagaacttttagagcaaattagtgcttttgacaacgttcccaggaaaaaggcaaaatttcagaattggatgaagaacagtttaaaagttcataatgaatccattctggaccaggtgtggaatatcttttctgaagcttccaacagcgaaccagtcaataaggaacaggatcaacggccactccacccagtggcaaatccacatgcagaaatctccaccaaggttccagcctccaaagtgaaagacgccgtggaacagcaaggggaggtgaagaagaataaaagagaaagaaaggaagaacggcagaagaaaaggaaaagagaaaagaaagaactaaagttagaaaaccaccaggaaaactcaaggaatcagaagcctaagaagcgcaaaaagggacaggaggctgaccttgaggctggtggggaggaagtccctgaggccaatggctctgcagggaagaggagcaagaagaagaagcagcgcaaggacagcgccagtgaggaagaggcacgcgtgggcgcagggaagaggaagcggaggcactcggaagttgaaacagattctaagaagaaaaagatgaagctcccagagcatcctgagggcggagaaccagaagacgatgaggctcctgcaaaaggtaaattcaactggaagggaactattaaagcaattctgaaacaggccccagacaatgaaataaccatcaaaaagctaaggaaaaaggttttagctcagtactacacagtgacagatgagcatcacagatccgaagaggaactcctggtcatctttaacaagaaaatcagcaagaaccctacctttaagttattaaaggacaaagtcaagcttgtgaaatgaacatttgtgtatttaaaaattgaatccattctgctgacttcttcctttcactgctgtttataaaatgtgtaatgaattctaacaactcaaattttgctttttgaagctgtatttttaagttaagaaaatatatttttggtataacttttatgagaaaaataaaatatattctggtccaaaaaaaaaaaaaaaaaaaaaaaaaaaaaaaaaaaaaaaaaaaaaaaaaaaaaaaaaaaaaaaaaaaaaaaaaaaaaaaaaaaaaaaaaaaaa

SEQ ID NO: 399 - DNA, 2540 bp, Homo Sapiens
attgggctgttgagcgggggccgaccgacggccaggagtttcttttctgcgcttgtgcgttttctgttcggtttccttcccgctagcggggccacgagggttgctaggcaacagcccctgggtgacttggtcttagggtcctgtccggcttggggctgatgaaaggagctgtccgcgcccgggctcttccgagaagtggttgctgacagccacaaagtgaaagggagtgaggcggcgtggacgagtaaggagtgacagtgaggattcacatttgggttatttcaagatgagcttcctactgcccaagctgactagcaaaaaggaagtagaccaggcgataaaaagtactgctgagaaggtgttggttctcaggtttgggagagatgaagatcctgtctgtctgcagctagatgatattctttctaagacctcttctgacttaagtaaaatggctgctatatacctggtggatgtggaccaaactgcagtttatacacagtattttgacatcagttatattccatctactgtctttttcttcaatgggcagcatatgaaagtggattatggatctccagatcacactaagtttgtgggaagcttcaaaaccaaacaagacttcatagatttgattgaagtaatctatcgaggagcaatgagggggaagcttattgtccaaagtcctattgatcccaagaatattcccaaatatgaccttctctatcaagacatttagtacattaattgctgtcaaagatgaagaagaaggcacatcttgacacagtacctgaatccagctgtgctgtgtttctggagtcctttggaaacatgtgtcccagaggagaagaggtttgacttgcgtgtagaaaacccggcccctgaggaaaagaccccactggttctctgatgacctgggatgcctaactgtctactccctgcaagcctcagagcagccaagtcattggtgttcattttccccacagtgatttttgtaacttctctttctaatgtttttctttatccctttaatacagaaccctcccaaacattggctagtacaacttgatttcatcatgttcatttgatacacaagtgaactggaaagtcacttcccatagaagcaaaagtacttattttctaccctagctgggtgcatgtgtgtgcacacacacacacacacacacccccacacccctttgccggttcctcgactcatacatccctcgtgctttcccatctccagtctgtattactgtaggttctcttcaaataattaattgagcagacaagtttgttttattttggagcctttttggctctggcttttaaacattgtcctggttggctcatttaattttttttttttttttgagaccgagtcactcttgtcacccaggctggagtgcagtggcgcgatctcggctcactgcaagctccacctcctgggttcatgccattctcctgcttcagcctcctgagtagctgggactacaggcgcccgccaccatgcccagctaattttttgtatttttatagaggcgcagtttcaccgtgttagccaagatggtctcgatctcctgacctcgtgatctgccctcctcagcctcccaggtgctgggattataggcgtgagccaccgcgcgcaccccatttaattattttttatgttataaaatttaatatggaaagtgagaatttgaaccttcaccatccaccactctattcaggtaaaacaatgaatgagccaccttagcaggagcagatttttcccagaagctgctgcctcttcctgaggcagaaaattggattactaaggctcaaaactaaaagagatgtcagcattgttggatagaaatgtcacctatatgggatttgcctgttttaataactttgtaaggaattcttgctcttctaggggtgcctggcgcaaccgtgggcaagttactgctcctctttaaacctcgtggtggttattgaaacagatttattagaaggagagggtaggtgcagagctggagagccatgggtgaggcagcttgtgacctgcctagcagccgctgaccacctctccaacagaagcctagtcctgttcagagcagcactgtcactgcaagtccagccccctttgccaggggctccattccacccctttcctgcagggaggggtgccatgagtcttgcttttggctcatacaggagagagggaaggctgccaggcactgcttgtatccctgctgataagaggagggagtcactccaggaataagacaaaaggagaggaggaggccatcacctctggcctcttccatcgtacacttcctgtctctggtttaatcatgatgcatggagctacaacagccatcttaggtccccgaggtgcccagcatcacgtaaaacatcgatatgctaagaagaacaaaaagagcccaatctctgatgttattgagctcctgcatgaactctggacctgcctgcctcagacttctgtgaaagaataaaatttctttttgcctaaaaaaaaaaaaaaaaaaaaaaaaaaa

SEQ ID NO: 400 - DNA, 3224 bp, Homo Sapiens
gtcccacatcccgcatccggcatcccagcggccgggcatgtagcagcggcagcaacggcggaatatgggcgggaaccactcccacaagccccccgtgtttgacgagaatgaggaagtcaactttgaccattttcagattctgcgggccattggtaaagggagttttggaaaggtatgcatcgtgcagaagcgagacactaagaaaatgtatgcaatgaagtacatgaacaagcagaagtgcatcgagagggatgaggttcggaatgttttccgggagctgcagatcatgcaagggctggagcaccccttcctggtcaatctgtggtactccttccaggatgaggaggacatgttcatggtggtggacctgctcctgggaggcgacctgcgctaccatctgcagcagaatgtgcatttcacagaggggactgtgaaactctacatctgtgagctggcactggccctggagtatcttcagaggtaccacatcatccacagagacatcaagccagacaatatcctgctggatgaacacggacatgttcacattacagacttcaacatagcgacggtagtgaaaggagcagaaagggcttcctccatggctggcaccaagccctacatggctccagaagtattccaggtgtacatggacagaggccccggatactcgtaccctgtcgactggtggtccctgggcatcacagcctatgagctgctgcggggctggaggccgtacgaaatccactcggtcacgcccatcgatgaaatcctcaacatgttcaaggtggagcgtgtccactactcctccacgtggtgcaaggggatggtggccctgctgaggaagctcctgaccaaggatcctgagagccgcgtgtccagccttcatgacatacagagcgtgccctacttggccgacatgaactgggacgcggtgttcaagaaggcactgatgcccggctttgtgcccaataaagggaggttgaactgcgatcccacatttgagcttgaagagatgattctagaatccaagccacttcacaaaaagaagaagcgattggcaaagaacagatccagggatggcacaaaggacagctgcccgctgaatggacacctgcagcactgtttggagactgtccgggaggaattcatcatattcaacagagagaagctcaggaggcagcagggacagggcagccagctcttggacaccgacagccgagggggaggccaggcccaaagcaagctccaggacgggtgcaacaacaacctcctcacccacacctgcacccgtggctgcagcagctgagcccacacttgttgctgctcaacaggactgcactcgtctctgccctgcccacccagagcccctctttgtgccctgatggtccctgtctcacccctgaaaacatcagatgcagaaaaagccctggacttggagctgggaagcctgggttctggtcccatctccatgactgattcacgtgtgacctcagacaagtcacgccctctctgtgcctccgttttctgcatctgccaaaggggttaaacacttctgccccacttcaaattacaagattatggggagaacccaattaggtaggaaacatgaaaaacctttgatatttataaaatcatttttacgtgcaaaatataaccttaatatttgaagtgacccccattccccaaagcaatcaaaccgtcatgactttgcaatttggcacatcctagcttgttagagggcacttccgaaaaacacagccctgacagcaaaataaaggtctgatatgttggccccttctatggaaacaacgctgccaaatcctggagcaaaacctgaagtgtcttcatgtgcattctctggcaggccacagtcctgagcttgtaagatggtgcagcatgcagaccagacttgtccccaaggtctcagcgctgcggtctcactcctcccctcatttaagaagactatccttaccttttagtttcagcagtcctcaccaccaccatatccccagtgctgggatggcacacaggtgtccattcagatgagagttgggtcgctgagcattggttactcctgcagagtgtaatcagcaccccatccaactggcccgaaagcccagacctgcagcagaactctccaactctctatcagctttcagggttttctctcctgggaagggtgtaaaatcagcttgtcagattcttcttacagagagtatccaatcggtattggtggagcggctccctatttatacaataggaagcatgggtgcttagaaagtttatttcaggaggaaaatgggttcacacaaaaagcaaactacattctgatctgctcagggagaagcttgcctttgaactggaagatgttgggatgagcagggaaagcttagactttggagtcaggtttgtgttcagaatccagccctgctggctactaactaactgggagaccttaggcaaagcatgcaatcgctctgaatggcagtttcctcatttttaaacagggataataaaactaatattgcaggggagttacagggttaaataagatcctgtgtgtaaccccaagcattggatgactcatagaatggccttttttgtcagcataatcgtcatcattatttagatactttcttccttcactcacccagcaggtcagttttctgtgcaaacaaacctgtttaggattcttccaaatgttcttcctggggtctttgatatttgtttgttacatcctgctgaagttcgactgtgtttttattttttcatccaacttccatttttcactttttacatgattactcaatccttggggctgtccatgtcatctcttagatttcttaaaagacattttaatgtatggttaggttttatatttttattttttaaaaaagaaatagtcagtgttttcctcctttcaaccgagactatttctggattgtgtgctcctcgtcagttgacttgttttgcacacttttctttacttcatgtccccatcaacaaccgtcctgctccccacctcccccaggaaataaggggcctgctcctctccctactgtgaccctggaggctcttaagatgatgatggttttttttattgggctgagttcacgaattaggggcaggagctggaagtcgccctaggaacaccagatttcctggttctgttcaagttggcatttcttgtttggaataaactatttcttggacattccttc

SEQ ID NO: 401 - DNA, 1121 bp, Homo Sapiens
ctagctctgtgggaaggttttgggctctctggctcggattttgcaatttctccctggggactgccgtggagccgcatccactgtggattataattgcaacatgacgctggaagagctcgtggcgtgcgacaacgcggcgcagaagatgcagacggtgaccgccgcggtggaggagcttttggtggccgctcagcgccaggatcgcctcacagtgggggtgtacgagtcggccaagttgatgaatgtggacccagacagcgtggtcctctgcctcttggccattgacgaggaggaggaggatgacatcgccctgcaaatccacttcacgctcatccagtccttctgctgtgacaacgacatcaacatcgtgcgggtgtcgggcaatgcgcgcctggcgcagctcctgggagagccggccgagacccagggcaccaccgaggcccgagacctccactgtcttcccttcctacagaaccctcacacggacgcctggaagagccacggcttggtggaggtggccagctactgcgaagaaagccggggcaacaaccagtgggtcccctacatctctcttcaggaacgctgaggcccttcccagcagcagaatctgttgagttgctgccaacaaacaaaaaatacaataaatatttgaaccccctcccccccagcacaacccccccaaaacaacccaacccacgaggaccatcgggggcaggtcgttggagactgaagagaaagagagagaggagaagggagtgaggggccgctgccgccttccccatcacggagggtccagactgtccactcgggggtggagtgagactgactgcaagccccaccctccttgagactggagctgagcgtctgcatacgagagacttggttgaaacttggttggtccttgtctgcaccctcgacaagaccacactttgggacttgggagctggggctgaagttgctctgtacccatgaactcccagtttgcgaattaataagagacaatctattttgttacttgcacttgttattcgaaccactgagagcgagatgggaagcatagatatctatatttttatttctactatgagggccttgtaataaatttctaaagcctcaaaaaa

SEQ ID NO: 402 - DNA, 313 bp, Homo Sapiens
ttttgtcataaacccataagtgagtttatttatatcaaatgaagattgtagcctggattgatacaaagcaataaaaagcaatactccaacctttttcctgtcatgatcctcattgcttaacgtggacaacattaaaggccttgtaccctaaaggaaagaaggcagaggttatgcaaagcaattgaatgtaggtaattgctgaggcaggtggttagtaataagtccggcctatattgcttgagggcaagcagccattggtgattcctaaaatgtccattggtgttaacataatagtttagaaataaatagtggg

SEQ ID NO: 403 - DNA, 464 bp, Homo Sapiens
  misc_feature (435)..(435): n is a, c, g, t or u
agatgggatttcaccatgttggtcaggcccgtctcaaactcttgacctcaggtgatccacccacctcggcctcctaaagtgctgggattacaggcgtgagccacggccctggccttgaatcatttttatgtgcttattggccatttttattcttgtgggaagtgcctgtttctccattgcctattttctggccaagctcccaagtcacatttcacttaatttttatcctgctgattgaaagcattttaacataaacaggagcaggacagactgtaattatctagatcttgctctgtcacccaggctggagtgcagtggcatgatcatagctaccacagcgtcgtactcctgagctgaagcagttttcatacatcagccttccaagtagctaggactacaggtgtgtgccaccaccccaagctaatttttaagatnttttgtagagatgcgaattcactatgctg

SEQ ID NO: 404 - DNA, 493 bp, Homo Sapiens
  misc_feature (21)..(21): n is a, c, g, t or u
cctctttttttctccacatgncacaaacaagaggctttattgcacataggtctgataaaactggtttatgatcttcagtctgtttccagtgctgcataactagataacgtatgaagaaaaaacgacgacgaacaatatattaatcgtttgagacaattttacagatatggaccatttttaacagatcttttaacctatacgcgtttcttaaactaaatatagataacccatataaatggtcgctcaaacatctcaggtgtttcagagaatgttagaatctattgtttgaagtgtctattgtactctatgcaaaaatccaaagtcatttgcgtctttaaaaatgatatggataatttttcttccgaaatgaagtgaaatcatgattaatcagatatatcagacaatttggtcaacatttaaataagcagctaatagcccacatattaagtgtcttgatatcttagaatgtcaggtacccttgccaggtgtggtg

SEQ ID NO: 405 - DNA, 566 bp, Homo Sapiens
ttttttcttttctttttagtaacttttatttttacagttaactttctgtctaaggtaagcataacttgccacagacagatgaagtcctgaccatcaacattccaaatttgcttaagagattcagtccattagaagaaaaacaacttaataaaagtcatggcacaggtaacacttggataaagcaagtgaaccagggtgccaattgtaaagttggcacttggatgtaactaaaatcatgactgaagtctgaaaatactattttcatcttcaataattgtacctatgagaaatctgaggcttgtgcctggcccggagtactgagctgattggtggactggtcatcaggcctgagctgattggtggactgctcaccgggccgggcttgtgttctggtgctgcaggaatagggctcagatggtctttggctcccagatggcagcaacgtgggtgcccactgtggtgtgggcctcagaaagaaggctgggtgcgaggaggtccccaaatctttggcagctttgaagtcaactaaagggagactcagggagcctcagagagcctcttgccgg

SEQ ID NO: 406 - DNA, 485 bp, Homo Sapiens
tttttttttcatttttaaaactttattaaattgtaatttacatacacatgatttaaatatacaggctgatgactttcgacaaatataaacaactgtataacctgcccccaccatgataatacaatgacttaatcgcccccaagaagttaccgcttgcccctttgcttcaatctcctctaatactctgctacaggtacatgttttacggaatcctgagaaatgtctgtgacctcataattcccaatccatttgagaagaggtatattttcctgaaatttgtaaaccttttcacaacacaacaggtcaagatcattttaaattcctcccagttcaaatccctgccttctaagtagcaatctataaatgggaagctttttttttaacttgtgtcgtgggagtttgttgtatggattacttcattacccagttattaatcctagtgcccattagttatttttcctgatcctctctctcttcccatcctc

SEQ ID NO: 407 - DNA, 508 bp, Homo Sapiens
tttttagagagataatatttattctcaaaatgacttagctttgcttgtacttcttcctgctagtatggaaccccaaataacatccaattgtcgcaagagaaatttgctaagcaggcggaaatatgattcaagagcctcttttagcttacagccagaaacttgctgatttcaatctttcccatattagcagcttttatgaaggatcacataaagaagaaaactccaggagaaacaaatcaggactgattttctcaaaactagtctccgttaattcacagttgcctttaaggacctcttaacttcttgcagagtcttgtccaaatttcttatagaacacttctttttctcctgatttggaagctcaaaatctgtgttcaaatttcagttcttgaagttgaataattgatctcttgagcttttagagtgtctgtatgtcattgagaagcttcatgcacttgcccctctcccataatcctcagtgtgttttcagctttcttcttttcctcag

SEQ ID NO: 408 - DNA, 501 bp, Homo Sapiens
caaaactttaggcacgaccctgcaaagggaaggaatgatggaggtggcagaacacgattgctttctgttgagaagcgtgtgtgcctccaggcacaggtggatctactttagcctccttagaccacaaaataatatttctccagattggatgaatgcaggggctacccaaaagattgaacactcagcattcgcacattgctcattcattcaatacctgtgagccacagctccaagtccgtggcacctgatcccttgacacatgggacttctcttgcaacacaaattaatagataaaatgaagaatttcaagctggtggctacagagtattaaaccccaagccactgagcaaggggctttgtgtgatgttctggtgttctgcaataagtctttctaaaaatgttatattatttaagtacacttagtttttggtatttgtaaacaaaactctaagtaatacagaaattagtaccagtcagtgctacccagagcataggtaaact

SEQ ID NO: 409 - DNA, 399 bp, Homo Sapiens
cctttgatttggttagttttattcgcatttctcatgtgcttgtctgctctcttcagtttggattctaaactccttttggggacctgggatccccctaagaacccaggcgctgcaaccccctggggctacatagtgttagctgctgattaaatatgttgttggggcagcaggtaggaggggtcatagttgatgggtgagattttgagactgcagaagagtgtctgtgaagtaagtgtgcacatcctgtggatgatgagtgcagtcaaccccagggtgactccactgcccctaactgcttcctcttcttgtggtccagggtccatcacacgggttggtaggataggagaatcattcccgacttctttcgcctcctcctcccctttgtcccctagggctgca

SEQ ID NO: 410 - DNA, 360 bp, Homo Sapiens
taccaattccatagggcccagcccagttctctggggctttattattgggcaaacaccctgacatttggagcactcccatgggcagtccataaagttggtgtccaggctctgcagacatgcctggtgatggtgatggtgcctccaccccagggcagatggaggggcttctactctgtcctgtcccctgctggatcttgggtgctgggctctctcccaggggactcagatggagccagaggccaagctcccagctagagctgcctgggccattcagacagtcgccttcaggggcacgctgtctgctggttgatccgggtccttcttccttgacatggtccagtgggtgaaaatgaggatgag

SEQ ID NO: 411 - DNA, 510 bp, Homo Sapiens
ttttttaaattttaaattatttatttaaagtcactaggtatggggagaattggtccataaagtataaattctatgaaaacaactaaatcattctggtataataaaaagctggatggtatttacaattcacgtttcttaattatgaaataacatgctaacactttcataagatccaagaactttctagaactattatgtaaatcttttaaaaccacaaaggaacaacctatttcagaacttacatacatcatttactagaaaaccactaaagatgtttcaaatctgaaactgcctccttccttccaaactgtaagaaacagtacgctcatcttgaagctttttaaattatttaaattcattgctaatatatttataactacattaaaaagagtttacaatattggaaaaagggctattgtcataatccactttattatgtctacatacatggtagcaaacctattacaagaacaattctagccagtgtggggaacagcatagtgaatgcac

SEQ ID NO: 412 - DNA, 456 bp, Homo Sapiens
ttgagaaagaccactttaagtttattacagcatattgttataatttttctattttattattgtcattaatctcttactgtgcctaatttataaattaaacgttatcacagatacatatgagtggggttaagggaagaaaaaacatcatatatatgaatggagtttggtactatctgtggtttgcgaatctactaggggtcttagaacatatactgctcagataaggggaactactgtattttcttgggcaggagtatgatttgcataaggaaaaaaatcacaaacaaaaaaccacacaacaacaaagtcttttgagagactgctttcaacatcaagagagaatgtggggagctgtgatggaaagctataaccaggaaagtcaagaggggaagccctactgcacttaacaggagagaaggtcaagtaaccccagaatctttttctctgaggatttgc

SEQ ID NO: 413 - DNA, 339 bp, Homo Sapiens
tttttttttttttgcgagcccctggcagaccagggccaggtcttgtttatttctgtatccctggtttccagggaggtggctggcatgggggtggctggcatgggggtggggtggagatcaagaaatgtgggagaggaaggaagagtatgagtggaaagctctaaactcagccttaagggcaggccaaggccaagtccctccggactctaaagggctcccagagaaagcaaacctcctacagtacgccagacctcctgccgcgcctgagcccgccagtccaatgaagaggccagagccctcgctgctggcgaagagggaggctccaatcggccaccacgt

SEQ ID NO: 414 - DNA, 480 bp, Homo Sapiens
tttattatatatatcttcaaaattttatttttaatttaaaatataaacaggtttatctacccatcactcctttgatgtcaggataagaccttttctttgcgtgtgggcctgctgatgcaggctgcacagaggacattgattagcacagcaagaagcattatcaatttcagctttagtagaatgaggactcaagacacttgtgaaacaaaatgaaggcaaagtcctatattttgacacttttctctccctcccaaacattcacggttgctttacccacacctaattccacagcatttttttctttaataacacgtcttttatcaggtctttcccaagttttcaactttttttcatagagattactctcttcacactcataattgtttgattttggtaatattgaattaaattacatcgttattaagtacaacttgcaaaaacaagttttggaacaaatacaactgattttttttttttttt

SEQ ID NO: 415 - DNA, 519 bp, Homo Sapiens
ttttgaattagcttttttattgtcttcaaatgcagtatcttaattatacagtaacaggtgctgaatttatagtacaactatagtagattttgcattcttacattacatagctgtgatacataccttgttatagcagtcagagccagccatctaaaaaaaaaaaaagttggacacaaaagaatcctaacaaattatatacaactcacaagtaggggatagcacaccccagctctttatcctgacctactactaccaagtcagaaaagctcttatttgaatgtatatgaagaacaacaaaacaaagcagaacaatatacaccaacaacacaagaacatatgcacgcgagtacacacaagtgcccagcaaattttacatcattctttaaaaattagagtttctagttgagtgaaccactggataatttgaatctgctaacttctttacactgggcatctgtattatgctgtcttctgccccaatgaactaacacataaaagaatcatcttaactgtcatgat

SEQ ID NO: 416 - DNA, 469 bp, Homo Sapiens
tttcatattttatattttaatgtatatgacattctgaaaacaggcaaaattatagggacagaaaacatcagtggttgtctgtagatgtagagggggagaggactaactacaaagggcatcaggaaactttttaagatgattggcatgatagtttcacaaaaacaatatttctcaaaatgttaaattgtactgttaattttgctgagtgaaaattatacctccataaactgactttttaaaaaatggatttaatgattatccctacataggtgcctcttcctcaagtttctttacctcaaaaaatggcatcactatctgcctatttactaaaacctgaaaccaggcaatgatacttgggacttcctttttccttcacaccccacccacatccaatccatctctgaatcccaacaattctacttccaaaatgtattgcaaacccatctcctaaacttcctatctgagcttg

SEQ ID NO: 417 - DNA, 373 bp, Homo Sapiens
ttttttttttttcctcacttctcaggctttattgggctttatttgtgggagaagggggctggtccccagtttttgcagtgcaaagccagagcgccacctgctggtagccctcaggtgtaggttcgaagctgctggggccccctggggtttgggacacaggagaatttcaggctgtgagtggagacagttactgccacgattccacaggcaagttgttcacctcaaagatctcctgcaccgactggtgaaagtggtcgtaggtgaggcgcagctttagccgcaggggggccttgttaggattgaggattctgaagagctgggtgataggaaggccaccccgagctggaactgtgttcccactgggggcctgcag

SEQ ID NO: 418 - DNA, 565 bp, Homo Sapiens
  misc_feature (533)..(533): n is a, c, g, t or u
agatgctagggtgaacaccaatacgaagtatggaagagcagaaaaccaggagacatctgggtccctgaggccactatggagctgcactagtggcattggactgctcacctctagactttttaaggtgagaaaaataaagccagtaatttgttgtttaatctgctgttttttggatcctttttttttttgcagcttaacaatatttattaagtgataagctcacagggttgaggatcaaaagagaaccatctatgtgaagagtataaaacagttcttgacacacaggaagtggccaatcaatgataactattatttttgggagattatctgactaccagcagagaacaaaaatcaaacagaataaacaacttgggaagggaagaaaagggctgaacagaagtgatgatagggtgataaaaaattcagaatcatagagccaaacaaggtacataagtggtctgacatatagtacataatcaatatgtataattccttttcctatcctatctgtgagaacacaaactaatgccatntagtcacgagaaccttgatcaacaagggagac

SEQ ID NO: 419 - DNA, 457 bp, Homo Sapiens
gaatgcttgctttatttaatgagcgctttaaaattattgataaacattttgtggaatcaacagtacctattaccaggtacactggctactttttacaaataaattccatcacttaatattttaagttttacacttaaaaataaaccagtgtgatttgaaaatttctgtattttcttaaaataatattggagacattcgttcaagatggtggatggagcacatgaatttgtctttttccccttccaaaacctcactaaaatgaaatgccaaaggaaatgaaccaataacagttaaaagaatggaagagcagcccagagcattcaagtgacttaaatgcacttctagaaagtggaaactgatggaaatgtgttgccaaagggaacagagtggggaaatggaagattagaggaagtgtgtttaaggttttgacacagaatccagaaggagacaagtgacc

SEQ ID NO: 420 - DNA, 360 bp, Homo Sapiens
  misc_feature (4)..(5): n is a, c, g, t or u
  misc_feature (292)..(292): n is a, c, g, t or u
  misc_feature (352)..(352): n is a, c, g, t or u
ttcnntagaagaaacttacctggaatttggaaaatgaaataagaaaggatcttcatgaagaagactaattttgactttttattattcctttttcatgtaccaacatcttttctttctttaatgttacggcaagctaacagggtatgagtaacagaattgactctagggcttgtttttcttctttattttaaaacaaagacttagtgttattttaaaatatgtttcaaagacaaagtgagtcatacctctatcatatacctcaacctgtctctggccagggggaattttaccngggcccatgggaaaaaggggaatagggaccaaaggctaccaccttaattaatggaaaggnttaaaagg

SEQ ID NO: 421 - DNA, 381 bp, Homo Sapiens
  misc_feature (199)..(199): n is a, c, g, t or u
  misc_feature (256)..(256): n is a, c, g, t or u
ttaaggggaaaactgggttttattactgtgttttttaatccatttagtagtcagtgtacttatctgaacaaaggagatttcctctgaatcattgaacaatagtccatgtcaaatcctacatatctacaaaattatgccagaacatctaatagtgttgggggagaagtgtgctgctctgttcaagcaagaggataggagnttccgtggcccgtgctgggcattaggtcattttgtgtctggcacaggcttgatctantagtctaattgctgtgttttaactttggtctttataatcctaatcaagggcaaaaggacatttctttccaacttggaaacaaaaaccccccccaaaaaaggggccttggcttgggcaacccgttt

SEQ ID NO: 422 - DNA, 413 bp, Homo Sapiens
  misc_feature (54)..(54): n is a, c, g, t or u
ttttttcttttttaaaaatatttttattatactttaagttctggggtacacatncagaatatgcaggtttgttccataggtatacacgtgccatggtggtttgctgcacccatcaacccgtcatctatgagaaacaagaatttcaacacagacgaactttcatctgcatgccacatatccatcactggcctctccacattcaccctccacccttttccacctttgttctctgcttaggatgttgacctctcttgactgcatgggtcagggccttctttccctacggcttcagaggataggaggaaaatttgggttagtttagacctcaggctggctgcaaccctctgggattgtgaattgccttgaggaagcccaactcacttccttggtcttagacctgctatggagggccc

SEQ ID NO: 423 - DNA, 477 bp, Homo Sapiens
  misc_feature (439)..(439): n is a, c, g, t or u
  misc_feature (464)..(464): n is a, c, g, t or u
ttttggattcttactgtagctctatctcatttatccatcatagcgtcccggggagatggggtcaggagatagcagtgccaacccactagcaagggcttgactggtatatatcacatgatccccaaaggcataacatgaagtctgtattatccccacatatgcagaaggaaggcttggagaagcaatctgaccaagatcacatccctttttttttttcggagatggagggggagtctcactgtgttaccccagctaagtcttgaactcctggcctcagggatccacctgcctcagccccccaagtagctgggattacaagtgctagccactgaacctggccagaatcacatcatttttaaatggctgaactaggatttaaacccatgtctggattaaacatcccaagatgttttccatgggtaagtctgttgtcaatcgntagttccctgaaggaaggcttaatntagcacagtattt

SEQ ID NO: 424 - DNA, 492 bp, Homo Sapiens
  misc_feature (424)..(424): n is a, c, g, t or u
  misc_feature (435)..(435): n is a, c, g, t or u
  misc_feature (458)..(458): n is a, c, g, t or u
  misc_feature (484)..(484): n is a, c, g, t or u
tttttttttttttttttttttttttttttttttgaaaatataaaactctgtattttatatacagtaaggaataatggaggctgataatgatcttgtgatcagctaagacaatgtcagtaagcaggtgaggtagggtgctttctatgggcaaaagggtgaatatcttgaatgaccagaaatgactcgaagagctgcattactatcatggtagcatgcatgaagtgatacatctaaacctttgctaacctaacattattactctcaagctttattatcctcaaggcttaaatggctgtagctgtttaatttaaaagcaaggcttaaaaaatagaggttactcataattccctttccatatccctttttgacttgaaaattatttccccaactacttttctggaatgctgcttataatacatattcncagattgcccnatgggttattctagtccattggnccgttttgcttataaaaaggccatgntttgtatc

SEQ ID NO: 425 - DNA, 289 bp, Homo Sapiens
  misc_feature (273)..(273): n is a, c, g, t or u
ttttttttttttgagctttggatatagcatgttttccacctgtttggggaagaaaagtcaactcagaaggagagacagaagggacaaggtgcaaggaagagatagcaagtatgcgaccatgtgacttaatacacagcagataccatcacaaccattaacagtaatcagtgctgcctgaattctcagtttgacattacttctaggtgttgggaagcaattcttttttttttaagcttttaagcttcctccctccaacaatgcaaaatttttccntcctctggattcccag

SEQ ID NO: 426 - DNA, 389 bp, Homo Sapiens
  misc_feature (342)..(342): n is a, c, g, t or u
  misc_feature (379)..(379): n is a, c, g, t or u
aaaatacataaaactgaataaaaattaaaatacaacatatcaaaatatgcaggctattagctgtgaaaagggagttatttcactaaatgcgtgtatagaaagagagaattattattatttgagacaaggtcccactctgttgcctaggctggagggcagtggcacaatcacagctcactgcaggctcaaggaagcctactgcctcaatttcctgagaagctgcaactataggcatacaacatcatgcctgtctaatgttttagttttttatagagttgaggtctcattatattgtccaggccagtcctgaactcctgggctcaagcaatcctgcctggttgnaaacagtttaaattaactgaagtaactataaaaagtnactaaagaat

SEQ ID NO: 427 - DNA, 435 bp, Homo Sapiens
aaatgaattagtttattgaacttggagatggacacccttataagggcaataacaaacaaaaatagaaataggtttaagttataacacacaagaataaaattagatgtaaagacgactttcctcagttttaaggtggataagtgggttgttaaattataacagatttctctaggagggtctggtgtactccaggctcgctgggaggcagacctggataatctctgagtatatctgtccccacctggcattgttgagacccttcagagtacttctttaggtccatgattgaaaattaagaggcagccagtgcctccattgttataagggccataaggtttggttatctttgataaagagaaatgggaaacatataacagagctcttccctcaagtccctgcattgggaacattagcacacaccaggaccctttccta

SEQ ID NO: 428 - DNA, 537 bp, Homo Sapiens
  misc_feature (483)..(483): n is a, c, g, t or u
  misc_feature (528)..(528): n is a, c, g, t or u
cagtttttatttcaaacattaagagagtactgattttcacatggtagttctgagtcaggccaaaggttttgaggtttctgacatctttcactgaaaagggctttcactgtagtagttttgttcagtttgttgtgggtgacgagtttaaaaatgtttttcatagccagaaactgaaatcaaatcaacatgactaaaagaaataactgatgaaatggtatatagaacattactgcattcgcatcggatcaagatggtttcgcccatttttcctttttcactaacactgttcctttttttccttgttacaatccattctttatgaacatacagaaatgaccaaagtcactgcaagtagctgtttttattttttgtgatctgttgcaagagtccaaccttgtttcctccgctgctggtttggtgtagcatccgggttttggtaatgagcatccgggatttggtaatgagcatccggattttggttanggtgcatgtggggaaaaatgcacatatacacaccctatacatggnataatatat

SEQ ID NO: 429 - DNA, 426 bp, Homo Sapiens
  misc_feature (250)..(250): n is a, c, g, t or u
  misc_feature (256)..(256): n is a, c, g, t or u
  misc_feature (258)..(258): n is a, c, g, t or u
  misc_feature (261)..(261): n is a, c, g, t or u
  misc_feature (267)..(267): n is a, c, g, t or u
  misc_feature (286)..(286): n is a, c, g, t or u
  misc_feature (418)..(418): n is a, c, g, t or u
ttaactttatcacatagttttattgaccacaaaagaagacaaatattaaaacacattatagatattagggttaaaaagaccagtggtacctccttgccgatacaacattgacccatattgcatatttttcttccagactagtttaaagtgactcaggtatttggtctgtattattttttccatggagacaacttcagaatctaatacaactttctgtgttcctgctgcacctgaatttatgtctgaaatnggcttncnatncatttngacatattttttagtgcanggattttaacctactaaaaataatggaacctcatctatttaaaactatattatgtgtttacaaagctatattaactaaaaaatttccttgtggtttgtggtagcttatctccaagggggcccaccatcaatncctggcct

SEQ ID NO: 430 - DNA, 603 bp, Homo Sapiens
  misc_feature (525)..(525): n is a, c, g, t or u
  misc_feature (560)..(560): n is a, c, g, t or u
  misc_feature (597)..(597): n is a, c, g, t or u
  misc_feature (603)..(603): n is a, c, g, t or u
tttgtctcaataatttatttattgactttattataatttcaaacatgcagacaagttaaaaatcatgtacaatataacccacatacccaccacctagatttaacaattgtaaccgtcataataataatgtagagagtaatgatgacattaccaaaatttcctaagtatattattttctgatcccttgaaggtatccaaaacccaccaacagaaatcatccaaaaagtttcttcactatgaacccttcagtgaacttttccccattcataacatgggggcatcgctgagggagaactaccaaggagcacacagggtgagttactcttttccgtaatgacgcctcttggtttcttgacttagggagtcctgggcctgctcacttctattactcatatggcagattctgcttcttccttctttggtacactttcaggttttcaatggaatagcacagttgccagatttagctaagaaaaatacaggatgcccagtcagcctgaacgtcagataaaccatattaaaatnttagcatatccccaatattggatggggatatgccnatacctaaaaaaaattggtgggttatccggaggtccnatttan

SEQ ID NO: 431 - DNA, 404 bp, Homo Sapiens
  misc_feature (377)..(377): n is a, c, g, t or u
  misc_feature (399)..(399): n is a, c, g, t or u
  misc_feature (404)..(404): n is a, c, g, t or u
ttttttctttaccaagactgtttttatttaaaatatacttggaataggtgaatattaatctaagcattttcctatcacttttaaaattttatactatgtactttgtattaaatagtacagtagtttcagtaagacatgtaaaatttgccattttaaccaccttaaagtgtacaattcagtgacatttattatatttacaatgttgtgcaaccatcaccactaattcatcaaattttaataatcttttaatttttgagccagatttagcagtgaggggctatataccaactttaatgacactaatgttaataagttctgataacccactaccatcagaccagctgtaattcatccaattttcatcatcctaaaagggnatccccatacggcattatggcngtccn

SEQ ID NO: 432 - DNA, 324 bp, Homo Sapiens
  misc_feature (157)..(157): n is a, c, g, t or u
  misc_feature (296)..(296): n is a, c, g, t or u
  misc_feature (311)..(311): n is a, c, g, t or u
  misc_feature (316)..(316): n is a, c, g, t or u
acgtttttaaaaaatatttatttaaaaataagatttcaaaaaatacagtacttaatacattttgagaagtaaaaattccacaatttaaattaaaaacaatctgcaaagaaaatagaaatattacgtgaaaaaaactaaatcgctacaataaattaanaacaacaacattgttcttaaggtagatacatggtttggttttcacattaagaaccagtgtagacttttcatctaaacaaatacatctcagctacatggttcccacttgtcatttcacccattttactcactcttctcantctatccttacaccnctcanctactatt

SEQ ID NO: 433 - DNA, 460 bp, Homo Sapiens
cacaagcaaacaaatctctcgtcttcttgccaaggactaacctttccaaatcaatgaatttgggagctgaaagaacttataatatatccaaaataaacctattatatgagagatgaggaaacaagaggttcagaaaagttaaatggctcctctaagtcagcagctagctgatggcagagctgagcctagtacccagattcttctcataaggctcaaaatgaagtattcctacataaaaatataaacagtatcagctgctgacaaaaatgtggaacaagtagaatttttatgtctttccagtagggatgtagaaacaatttggtaatttcttataagttaaagatacatactatatgacctagcaatccccctcctaggtatttacccacaagaaatgaaacttatattcaccccaaaacctgccatgaacatttacagtggctctgttcataatcacccg

SEQ ID NO: 434 - DNA, 518 bp, Homo Sapiens
  misc_feature (1)..(3): n is a, c, g, t or u
  misc_feature (425)..(425): n is a, c, g, t or u
  misc_feature (501)..(501): n is a, c, g, t or u
nnntttttttttcccatacaagatggtttattttatcctacacacagaaaattgcttatgagtatcacattaccgctcttggttatcagttaacaaaggctgctaatgaacagcatcgttatcaagttgggtaagagacgccctgggagtccaggcaaatcatgacaacacagcactttgttctgaaatatagctcatctttcatcacacacaaggagggtagcccagtccgagagatttcctggaaagtggaaaggcaaagaatattccgtgatgtgatcccagaaatacagggttaatattacaagggagagaaatgctcacggggccttagcctgatggcaattgtagaatgtcatggctttcctcagcctccaccagtcatgtcttctatgcaacagccatgtacattgtaataataaccncaaataattgtataaggagaaaaataataactgacattcatggccctctgcaaaggcacagcatctgctttctcanttgggccttcgtgggtc

SEQ ID NO: 435 - DNA, 292 bp, Homo Sapiens
gaataggtgatagcacagttgaagcttaaaggataagaggacatctgcataaagggataggagaagtgccattcagagagtggaatcataggcacagacaaacaggattacaaatgttctgggaagacagtggagtggtacagaggatactgatgtggggatgggcaaaggtaagaggtttcataactgatgacctccattttcacaatgagtaggtcatctatgagaataagttgagcaggatcaaatgaagacttataacagtgaagaatattactgcaatttgtactgt

SEQ ID NO: 436 - DNA, 354 bp, Homo Sapiens
ttctgttacagactaatatttattttattatcagtaagagtgagttacatactaggcaaagtattggatacaataatcaggaaacaaacactattggtccagaatttaaaactttatgagcgaagtgctggcacaggacttaataaaccccctccccattccattctagcccccaaaagactaacttacagaattaaaaacaaaaccagaactcttgttccctcacatcgtgatgactccgtgtcctggaatgtctggcaagcattacccagattcctcccctcctgtgacatatttctcagcatttctctttatcttgtctatgcttttgcctgtacctcttcctaggtagga

SEQ ID NO: 437 - DNA, 391 bp, Homo Sapiens
agctcatcagctatcgtgagtgttaatgtattgcatgtgtggctcaagacaattctttccttccaatgcggcccagagaagcccaaagattggacactcctgtagtggttgcctgggccatggagagaagagtgggaatagggtatgactgctaatagttatagcttctttttgatgtggtgaaatgtcccaaaattagattgtggcaatggctgtacaactgtgcctatactaaaaaccactgaattatacactttgagtgaattctatggtatacagttatatctcaataacactatttttaaacaacagcaacaacaaaatgaaacattaaaacagctgactggatgcttataattcaagcacggggatgcacagaactagggacggg

SEQ ID NO: 438 - DNA, 442 bp, Homo Sapiens
tttttttttccttttaccagtttattccagatgcttatgtgcttcatttcttcatcacagttactaatgagtggagaaatgttctgaagtatccaagggagaaaatctatccagaatatattcatggactagcttattgacacataacaaattaaattgatggtacattggaatctttctataaattccttgttaccacaatgtaagcttcataggtttacccgaggtggaggtggttgaaagtggcagtaatacagtgaaaatgaaattagtactatgtagtatctattacttttcaggctgcatttaagaatagaatatatccaatactactacttttcatgttgagaagaatgccttttgtgatctgagtctcacagcactcaggcaatgccactttacttactgtatgtgaagtctactttcattcctgtctttagtg

SEQ ID NO: 439 - DNA, 462 bp, Homo Sapiens
actttagacaaaaatattttattttttttttgacttgttattttgagagtataaaagtgatcatattttcctctcttaatgagagcttatatgtaattgcctgctgtcagtgaatcttgggtttaaggcccattagaaaaatagcaggctttagtagagtggttttttccagtgagtacttttcagtcaacaggtttattgggaggtggctaaaatgcacatggaggtgagcccttccctgccagacaagcaaagaatcaagctgtatatttaaaacttggctgttaacccaaaggatttctacaggaagtttttttctcctttgatgtttgtagaggggttttttttcccctcccgacaaaatcaatacacagaaaacccaaagctcttaatttgcaaaactgaatggatttgtgaaaatagatacctttttggcagaaatgcaatttggcattaatccct

SEQ ID NO: 440 - DNA, 388 bp, Homo Sapiens
caattcctatgtattttattttatgcatttaaaaaacattattctaggccgggctcagtggctcatgcctgtaatcccagcactttgggattacaggtgtgagccacacgcccgggttaagaagagttcttgaggctgtgataagcttttctcaaattgtttttaaagccagctcatttcctgtgtgctcatagtatcatagtataatcagtgcactatcctcatatcctctaattgaaggatttttacggaacatgaggtcttggcagaagccctgcatttgttcactgttgttttccaggagagatatttgcagccactgaggatggtcaagcgcattcaccagctctgaaagccctgacacaggggttccacatagatgcaggca

SEQ ID NO: 441 - DNA, 286 bp, Homo Sapiens
ttttgccaaaagacaaatattaatagatccaagatttaaaattagcatgtcacaaaagaaatatggctaatacatttaaaaaatattcatcctccctagaaatgaaacaaaaatacaaaaccaaatagtaccattattttacccatcaggtaggaaactttaaaacaaattttacacttaatatttgtacatgtatctgaaacaagaatgctcatactttactggatagagttggctgttaccttttagccagagataccaaatgtcttaaaacatgtatacatgg

SEQ ID NO: 442 - DNA, 372 bp, Homo Sapiens
ttttgtgtggaaacatgcttttatttttcttgggtagacacctagtagtggaatggctgggtcacatggtaggtctaattttcacttttaagaaactaccaaaccaggctgggcgcagtggctcacatctgtaattccagcactttgggagacagaggtgggaggatcacctgaggtcacgagttcaagaccatcctgagcagcatagcaagaccccatcatctttacaaaaaaataaaatgtctattgaatcaaatttacttaatattcacaaacttttctccaccggaaggatgtgaagaaggggagacagagactgttaaagctataggcagtctgcaggtgattttttttttttaatgtggtttggaa

SEQ ID NO: 443 - DNA, 391 bp, Homo Sapiens
ataagaagaaaaggctgtaattttattttcaaatttttggaagtttttcagaaaaaaataaaatgacaagaacacatacaaatattgaaattattcattgaactataaacacttagcagaggaagggacttttgatgtatttgaatccacctccttctgaaagcaggaatcacttctaaatgtctctcatatctttcttcaaggagtggttttccaggaggttcccagcctcctcaaatctttcccaagtttgatgcacttcacctcataaaaataatatatatatatatatatatttttctttttttttttttgagacagggtcttgctctgttgtccaagattgagtgcagcagcatgatcaggactcactgcagcctcacctcaccca

SEQ ID NO: 444 - DNA, 365 bp, Homo Sapiens
tttttttttcctcacatataaaatgtaggtaggaaagtatatggattacatttctttacttgcatcatggatacatagttcaattcagttcaaatcaaaaccattcaatacatatttactgagtcccttctgcgtgtcaggcactgttttaggcacttgtgatatatcagtgaaaaaaacaaaggcccctgcccacatggagcttacattatagccaggggaaacaacagtaaacaataaacacaaatatgtgaagtatctagggtgataggtaatatgaaaaacatagagcaggtgaaaggggtatgggatttctcgatctggaaggtagacagctgcagtattaaatagtatggacaggatag

SEQ ID NO: 445 - DNA, 467 bp, Homo Sapiens
tttgatttaacaaatatttattgaacaacaaaagtccagaaaatccaagccacgccctccgtcagttttccagagtgagctttcctctatctacaaagcctaaaattagaggaagatactaattttttttagaattgccttggaatcctgaatacgtttcagcatcatcgagcttagtatgttccaacgtgtgacaaaactgaaagcagaaatagaattcagatacaagggagagttgaatccattactgtattttctagatgaaaaacagaacaagacaattacaagaccacgacatggcctctcaactaagtgtggttcgatttcaaagaatcctgcttctacagtggatgggcacaattctcctgagttgccaaatttcaagttactacatgttaatgcatttcgcacatatattgatcacataccttgactacggaggtgatgttacaatggatgaggctctg

SEQ ID NO: 446 - DNA, 433 bp, Homo Sapiens
taataaatagagacagggtctcaccatgctgaccaggctcaactccaactcctgggctcacacaatccttccaccttggcctcccaaagtgctgggattacaggagtgagccaccacgctaggccaaatagtagtttcttaaaggacagttaacattttggaatctgaaaccacatcaatccacttttttactgttaaaatccattgctatatctggaattttcaaaggatcttttgcctttgcttgattttgcaacatcatgcattggtcatttgcaaagcctagatttactgagttatgcccatcttccaaataacatatttcattaaacaacattttaaaatattgcagtccttaaccactgatatcataaggaaagtcttttaagtactaggaagctgtcaaactccagctgtcaactttttaaaaatt

SEQ ID NO: 447 - DNA, 356 bp, Homo Sapiens
tttggactgcattttttatttccaaatatatgctgctccttcttgtgggaggattttacctgccattctactgacatgaggtttggctatgtaatttatggtgcccttattttgggaagattgttttcccactctgaggatgtcaggcttggcgaagtgactcatttagccaaggaactctcagggggagtcagttttcagcaccatcatgaaggttttcagagcagagtttgtcagggccatgatgaagttctgccatatctcttccttctgccacattcttagcaatgtttcagaaaaagactggttcttcagcgtgggcccaagaaagaagtggcaaagctactttttaaggt

SEQ ID NO: 448 - DNA, 565 bp, Homo Sapiens
ttttaggcatggttgattttattttcaatggaaaaacctttcagttgggtttattggtcattgtttttcagtgatttgtttgccattgacattagtcgtgttgtataacaaagaagtgtccattaactttgattaattgtctcttacgccgaaagtcctaaccacgcagtgctccactgataccacctgaagggcagaagcggaggggtgggctttggaattgagaagagcctttggatgctcacttaactgtaatttcagaagcacagacaagcaacaagatgacaactataataaaaacaaaataatacaaataatatcagtggcagcctttacccagcagtggctgtgccagcctgttgcgtgtcctgagatgtgggaactcatctaagcctcaccctaggaggaaggtccaattcatcctcccatcttacagaactctaaaagttatcccaactttactcaaagcaaaatcctcatggccatatggctttgatacagtcctggacaccaccatttctggtggcaaattcacagcaaagtaatgtccctgaacttcagcttc

SEQ ID NO: 449 - DNA, 385 bp, Homo Sapiens
  misc_feature (370)..(370): n is a, c, g, t or u
gcgccgccggggtgcttccggtgcttgcctatgcggccgtggcgtggctcacgtggcccctaagtttccgggtcttcctcagtctggatggctgtgtggaaaaagcttggtggtaaggcctaaggaattaggggcagggggcgatgccgccagccgagatggtcctgtaagcctgtgggtcaaagacctaacttctggagcgtttgggaaagctgagggtaccgatccgctcagggccgtgaggtctcaccacggtagcgcaggggcccgcgtgtcctagagatccgaaccgcgggcctaacacacggctccgggagcccgccccgggcccgcgccggccaccctgccccgcagcggccatgcgcacctnggaagccccgaccat

SEQ ID NO: 450 - DNA, 550 bp, Homo Sapiens
tttggtggggagggggtactgaacattccctttgttgaatatatttctaatattttccattaaacaatgaacttttttttgcacgtataccttttcttatatctctggtatttctttttttagggtagacacttagcaatggttgtcagttctttaaaaggctattttctcgagtagttgttacttattaagcttaccacaaatcaatcttgtgtttcttatttaatgagaattagttattatccccattttatggatgaggagcctgagacccagaggttcccaggccacccagccagcaagtggcagagcttttccaggcatgcatctcctccagtgcatcacgtcggaagaacttgcagtctccacttaagatctatttctgtccagcaaataagcctagtgcttgggggtgccaagagaagaaaaacaaaaacaaaacctgaaaccactcacaaatccccactctctagatctccagagtcttcctcattctttgtccagaagcttctattcctacaacatcctctctcaacatgattcagtttcc

SEQ ID NO: 451 - DNA, 364 bp, Homo Sapiens
tttatcaaaaaaaatttctgtatatttgggtgagttaccaaaatgaggcattcttctttgcttaagaagtggggcccatgacacagggggagactctactttgttagatcgctgctcaaattctggaccacaaacttgggcattggtggtcgttttctattcctagtggatacccccagtggattcactcattagaggttgtctgaatgcgtattatttcccaggagcatgtcaattaccccactctcttaccaacaatgcttttatatatggccggaagtgtccatttttatcttcaataaattttaatatttactaagcttgtatcttcactcgttaggaaagagcaggcttttgttgatta

SEQ ID NO: 452 - DNA, 374 bp, Homo Sapiens
atgtttgttttgttttatttccaacttttttggggtaccttaaattgtaacttccaagaacctgcttctactacgggaaggcaagctgacttttaactatattagttttctttgtgtagttcttcatcaacatgcaaaacaaggccccatcatgtgggaaaacttacataaaaaaactttaaattaaaaaaaaaaaaaagcttctttactatttgtaactcccattcttaggtttcctttattgtgcgctatagaattgttcctctttcttgtccctaggcatcatttatatggttcttgttttggtacaattccccataatattccacaatgtactgttttgtgagtagactgaatagatttttttttttttg

SEQ ID NO: 453 - DNA, 395 bp, Homo Sapiens
tttgattatttttccttgcaattatattagcttttggttcatgtaatttgaagttttcttattaggtatataagatattaaggttgttatttacttttgataaaccaactctttaattattatgaaatgacctctttatcccaagtaatattttctgctctgaaatatactttcatattaaatagctcttccagctttcatttgattcatgttagaatggcatatatttcccaatcttttgctttaacctccctgtgtccttatagttaaggtgtagtttcatgtaagcaacatacagttgggacttgatttttaaccaatttgacaacctctgatgtttaattggattatttacattacattttctaggaataaatttaacatctttgtcgtct

SEQ ID NO: 454 - DNA, 420 bp, Homo Sapiens
gatgaaaaaatgtttagtttatttaaaattcctgtttagagtcaactttatttactggctcctgtaaccagtgaaacattctgaaatgtattagataatggttgtatgttttatatatttcatatcgaatatagtaagtgatttaatcaattaacaaaagtcctttatttgtgaacaatgagagagactgacactagctttgtatggttttactttggaaaattttacaaatttaaagtaataaatgtattcattttcttactctgcagaagttcaattttaaaaagaacattactgttctaaaatttcaaaacatacaacatagtctgtgcttgtaacattttcagatttgtctgtgacagcttgatgttatgaagagaaggagggagaatggctgtgagtggagaaaagagcgagaga

SEQ ID NO: 455 - DNA, 354 bp, Homo Sapiens
ttttttgcacttttaattttattaaaaaagaagcaagtatcttcaacataccaaatgctttcacatttctgcctgcaggcactgaccacaaaaatacagacccaacacaacaaaagcaattaacacaagataattaagtggtagttacaagtggtgggcaggggaaagtgcaagaggccagctggctgagcaagtggagtcatcacatgtgtcctcaacattgtgggtttagggatccagtgcaatcagttcacttctaagaggactggggttgaggactcgagctaggctgctctaaacttgtacaaacagaattacaaatcagagtgccaatttatctgtagggtttgttta

SEQ ID NO: 456 - DNA, 429 bp, Homo Sapiens
gcaaagcaaaactatattttattaataaagtcaatggtaacatttgcttacgtattagaaatagccctgtgaaattttagctgcaaaagggaatcgtttaaaaagcactgctcaactccaagtttgacttacagacaaggtaacagccaccaaacaaatgaaatccctcttctcctttacagctgctccttggacagagggaggcccgtcatctgggtctgaaggaggctcccaagactctgacacagaacactaaactccagggtgttctaggacagtgacaggcaaggctgttctcaatcatctcctgtctgacacggacatcgagctaagctatgagcaagggcgaacaatgcctctcagcagctcctcctccttgaccaggctcccgaccacggagcatttcagtcaaggtctagggatttgagg

SEQ ID NO: 457 - DNA, 416 bp, Homo Sapiens
ttttaccatggtttccaagatagtttaataatataaaaagatgcttacattttgcataatagaaaaaagtgtacaaagctatatataccatgattccaattctatactcataaaggtatatattttttataattatatgtatatatacatatataaatacatacacagagaaaaaagagagtagaaggaagtgtaccaaaatctcatctggttttgagttgttgaattctatttttaataaatatttttctctagattctctatagtaaacatatactactgttataatcagaagaaaaaatgcgatttttaaatgagttgcaaacacgaaccatcttatgatggtgggagcccccctaagctagttagaacaaaaatttggtaaaatcaagtactgttaataggtgtgtggtgct

SEQ ID NO: 458 - DNA, 423 bp, Homo Sapiens
ttttttttttcattcaacgctttttattgtggacccttagcatctggtgacatgaggtatctgccattggccagaaagtgttctgacatctttggcatcacaagcatcacttagattagtttattgcctctcttgtgtcaaggcataagtatgataatgatcaggtttgcatatatccatcaatttaaatagagaaataaatataacagagacaaggcgcggtggaacttacaatgtatagcttctgagaaagtctataacaacttagagaaaataagcttctgttaactctgatatcaacagcaaatcaaagagggagcttctctcccacagaaacataacagcacttttgctgacatttcccactacacatgtatattatttttaaaagaagaaaaaataatcaagttggatttttttaag

SEQ ID NO: 459 - DNA, 422 bp, Homo Sapiens
  misc_feature (121)..(121): n is a, c, g, t or u
  misc_feature (126)..(126): n is a, c, g, t or u
  misc_feature (410)..(410): n is a, c, g, t or u
tttttttttgtcgagatgggggtctctctattgctcaggatggtttcaaactcctgggctcaaacaatcctcccgcgttggcctcccaaagagcttggattacaggcatgagccaccatgngcacncccaagctgagaagcaaacttctatcttgtacaagcaattgctgtttggggacacagccaacctcatacatatgaactaatgcatgccaagttttaatttccttaactgaaaaggctgatgcatatgacatattgcacctggtggcaggcagttacatctactgctaaaatgacataagatagaagaagttttctgtagagaacattgtgtgtcacaaacagtgacattttcaaaagtgcttaattcaatatgacttcccagcggcaaagcttgcacctatggntttttttttttt

SEQ ID NO: 460 - DNA, 306 bp, Homo Sapiens
tttttttttcagtgacttatcaaaaatttatttcatataataaattatataatttattttcatctttaaacagtctacaccgaaaacatttttggaaacatcttttccttttggtaaaacaggttagcaggctgacatcagcttcatattctcatggctaaaatcccccacggttatacagttaagcatagcctttctttgtatttctcaagttgacaccacttgatataaactcagacaatataaacatttctagattttgcctaaggccttagctttaactgcagagtagtgagtaggaaatta

SEQ ID NO: 461 - DNA, 374 bp, Homo Sapiens
tttttttttttttttttttttttcataattagaacaccactttagtttattagttaaatcaaaagattaaaaatcagaaataatcatagcattatatctcagaataaaatatttaataataagcatgctgaacagcataatataaattcttattaagcatgaaatgtttgcaaacagaactaagaaagcaagtatttcaatatttgctaacatgaaaacagattcaagatatatagttttaaaaaagaatactacataacaatagattcaccgaactattttttcaactcacataattatgtgtaaatggatttttacgagagtttccctgactcttgccacagaactgacaacagtggttcctggttgaggca

SEQ ID NO: 462 - DNA, 563 bp, Homo Sapiens
tttttttttcaaaagacacaaattgaactgaactttaattgattaaaaatacaatatatgaaacacaaatattctgattggaattaatagcagattagacactgaagaagattactaaatttgaaaacagcaatagaaactaaccaaaatgaatcgcagagagaaaaagacaaagaaaaacaaacaaacaaaaaaaacagaacagtgaattaggggacaacatctagaagtctcacacagatgtaactggagtctcaagcaaaggagaaagaaggggagacagataaatgtttgaagaaataatggccaaaaatttcccagatttgagctgtgcacagtggtgtgtgcctgtaatcccagctactcaggaggtggagggatcacttgaacccaggagttcgagtccagcctaggcaacacagcaagaccccatctcttaaacaatttttttttccaaatttgaggaaaactttacattgtcagatccaagaaacagaagaaaagtggagggggagggaaccacaccaaggaatattttaatcaaattactgcaaaccagtgat

SEQ ID NO: 463 - DNA, 445 bp, Homo Sapiens
tttaacagtcgctgtggaattttattaagccatcaaaatttccttcacactcaatactgttgaacaacaagataacacatcttcttgctcatcccacttgaactcaagtcatcagttttaggcacaaaggttttagttttctcgggaaatcaagttttaaccacttgaggttactactgcagcaagcagattttgttgacaaatgtgaacagctttcaccctctgttagtacaaattaatatcctttccttaaataaagttagttagctatttttggtttcaaaatcagtttccatcataaaataacagcaagacactgtacacctttacgttcaatactagaaatttcacccagtgcatcagcatctgtgcggcattccctcagcacgggctctgctggcgggcagcaggggtgctgagctctctctagtgcgccctgtgcagc

SEQ ID NO: 464 - DNA, 465 bp, Homo Sapiens
ttttttttttgttattctaaataagatacatagcaattaaaatagagaacaaataatggatgtttcctcaccatttgtttcatttcaaataaatataaacacatttacagcaaaagtatatggacattttctctagtttggcaaaaaaaaaaaaaaaaggtcaacacatcatcagttacaaatgttaagtggtcaactagaaatctgtgtcctaagaaatataaaatacaacaaagactggtacacagaaagattacatttaactccataaaaaagctacttcagttctcacttgcattttgaaggaaaaaaatgtgtatcttccattttagactgaagcattttggtcctcatgtgtagctggctgatgaactacacacacacacacacatatatatatatatatacacacgcacacatatatgtgtgcatgtgtatgtgcataatttttaaagagtctcattc

SEQ ID NO: 465 - DNA, 400 bp, Homo Sapiens
tttttttttatgaaaagagattttattgaaggtaaaacattagaggttcattgagaatctctaaatccatgttttgacattgtcaagctcattgcaacttccagattgagtaacacttataacacatttccttttcaaagtgcaagatttttaaaagagacttgtcacatattcatttggctggtttcaaatggtgagctgaatgctgggtaatctctactagctccttaatcagatttaaaattctcagtgtttcctagttgtttctgcatactttatgtgagttgttatagctgtaacattacactttatttgctgtttgtgtttcgtgacttttggtaattctggcatttagaaacctttcactttgcttcaaaacgtagttatattttggagtttt

SEQ ID NO: 466 - DNA, 454 bp, Homo Sapiens
tttttttttagttaactgctcacagctataaatttccctcttagaactatgttcagtgtataccataaacgtgctatttgtatttttacttcatttgtctcaaggtattttctaatgtcccttgtgatttcttctttgaccaatggctgttgaagagcgggtttttaaatttctacatatgcgtgacttttctggtttttctagttattgatttctagcttcattccattgtaattgcaaaagatactttttatgacttcaaattttcacacttactaacacttgttttgtggcctaacatatggtttaagaatgttccatgtgcatttgagaagaattaatattctgctcttgttgggtagattcttctgtatatgcctgttagggataattggtttatagtgttgttcaaattttctatttccttattgatcttatgtctagttgtttaatc

SEQ ID NO: 467 - DNA, 453 bp, Homo Sapiens
ttttttttttggttactatcaaatttattcattcaagaaggagtgaaaacaaagcaattttacaccttcatattagacacaatcttggaaaacaggttttaatatggatataggaggatgttgctaagtgccatcatcgaatatgaatattaaaataggaatgtgaatattaaaattagatgttactctgtaattccagtgctttgggaggctgaggaggtaagatcgcttctggccagtagtctgagaccagcctggacaacatagcaaaacctcgtctgcacaaaaaatgaaaaaacattagctgggcatggtggtactttcctgtggtccaagctacttgggattacaggcacacgtccggctaatttttgtatttttagtagagacagggtttcgccatgttggccaggctggtctggaactcctgacttcacgtgatccatctgcctc

SEQ ID NO: 468 - DNA, 363 bp, Homo Sapiens
tttctggttaaaagcactttattgattacagtatcaattcacaacatttcataaagccactgtacaaatagaggaatgaatcactgtgtaagaaagatctaagaacagttaaatcatgatacaagtccatagtttatatggtttagagctttaagagccttaatctaacacgtttacccttcccataattagactactactgacattcatgttcagttgaccacgagtgtgtacaaatcattctaggtaaagacaaacactttcagaatgctttaacagaaaaataattttaatcaactttaaaaacacacttagatgtggatgcctttggataggaaaatagaaatgcaagtgttcagatgc

SEQ ID NO: 469 - DNA, 432 bp, Homo Sapiens
agcagtccctggggtctgtagtggcctctggagagcccttctccccaggccaggcgggaaggcccccgctccggcctggttgaagtaggggaacgggtcctaacgcggggccgactcccttgaccctctgacttgctggcttcccttgttttacagtcctcggcctggcggaagttttgcaggttgtgaagacccctagtctttcattctctccttgtcacagccttgtagggcgtgaaggggtcattgccccatttagggatgcgcacctcctgatttcccgtccactgctctgcgccctgaagtggctgaaaagtgctcttaaaaggatgggaatcccgtcgccctcagctggtgcgctctccactgggtcgtggggctcctcatttcatcctaagtgagcccctccatcacctgtgtgttaaggaggca

SEQ ID NO: 470 - DNA, 528 bp, Homo Sapiens
tttttttttttttttttttttttttaatagacagaagaatttaatacatgtgatgctttgccttccatttacactatcataaattacaaagtattgttcacttcacaaaataaaaccatttccagataattttttgacagtatcaagaagtacataaactacaacaaacaaatctgtacagttgggaggagggataatagcagggaagaggtcaaacctccctgtgccaatggagtccatctgcatagcccttgggactgtccaggtcaacagtcacacaatgatgctccacgtaaaatagtcattctcttctgctcactccaaagcaagactggtgagtttacacaaatcatctcaatcaaaggaaaagacattgcagttggattttttaaaaatctagatttacagtttttgatgttttaaatatttcacctatgttacaaaatataggaatctgggtgtgaaaggctcctgcctaagataaatttaccacgtgactggaactgtagtaataaaatcatttttccc

SEQ ID NO: 471 - DNA, 409 bp, Homo Sapiens
tctccagtgaatgaatttatttttatgctggaaatccttgccttgaagtgaagacagtttcaagcctttctaagcagttactgtctgttcacacaaatacaatgccagctgagtgtgcttcgccgagacagcaccagggattccagcacagggaattgaaaacagacacctgcaattcatttccctgcacagcctagaccaaactatgctgtgatgagcattcccagggcagtgtttggactggtgtgtgggtggcatattcctgcagaatataagattaggttatcttataatagacataataacagaagattcattcaaccagcaaatatttattaaatgtctactttgtgctaggtactcttctaggtactagggatatcacagtgaacttaagtctaaaaattcc

SEQ ID NO: 472 - DNA, 465 bp, Homo Sapiens
agaaatgtagtcagactctttattgcactgtctcaatacccttctcctggcatcttacagcaggctgagaaatgtggtgttttagtggccacaatggagggctgttagcacaggagtgcaggatggaggtgagcgggggggcaggcagcagactctgccagcccagccatctcgtctttcctgctgacctccattcaaagatgaaaagtgaccttggctgtccacaaggatcaatggtgttgaggtacctggctcacttttgttacataaccaagtccagtgaactacagtaatgtagccttttccaaagcttgaaggagcaagaggaaaaccatgagaaggaagaagagagctaccctttgggacacagcagggcccagtgagtgtgttcagctataaatatgggcatcctaaagatccatcgcaatggtatgtccttctgttaattgcaaagacaaagggctg

SEQ ID NO: 473 - DNA, 307 bp, Homo Sapiens
gtgtatttattgtgtcgaggtggggtctaagttgccagctcgagagaaatttaagaaattgaggcaggtgtggtggtgtgtggttgtagtctcagctacttggaagactgaggtaggaggatcacttgaagtcaggagttcgaggatacactgagctatgattatgccactgcgctccagcctaggcaacagagagaaatttacaacaaaggtaagaagagtgtgtgcttttaggaacaaaatgccagtcaacacagaatgctactgagtttagatcatttaggtacaatgggaaaaacaaacacac

SEQ ID NO: 474 - DNA, 386 bp, Homo Sapiens
tttttttttaccaggtgcatagtgaaaaagtttatttatgacagattcgaaaactcagaagagatgacaaagaacgcacaaaagcatcacaaaactgttacctaatataaaacgcaagaactgagctacttgaagaagcacagctcagaatcatcagtgtaatcgcagtaacacacccagtgccacagggtgataaaaatggtattttaaaagaaaaaccactcagcaggacacaagaattaaagtaacaatttggtaagactcttagaaatcacagatgttgatagcatttctcatcataggggacatgtaaaacaagctgaccataataaatgattagttgggatacttttgtattttaaagaaaaaagataaaacagtgacac

SEQ ID NO: 475 - DNA, 270 bp, Homo Sapiens
actttgcatcctgaaataactaattaatctctccaagtgttaacactgataggagatgcaaatgcctaatgacagccttggtatttgttgaaaagcagatagatgactttgtgtttgtacctttctgaatattgcagccttttatgaaacggatgaaagaaaacagatttttcctcaaggggttaagacttgcagtggggaaaagtagaacaacgagatgtgaggacaaatataatttcattagttgcaccatgatttcgtggtaaagaa

SEQ ID NO: 476 - DNA, 405 bp, Homo Sapiens
tttttttttttttttttttttttttttttggtaattttggcctttattttgtgaagctggattttatttcacaaggcaaaattagacagtcaaccatttatgcacattctgtgttgaacattttaagttaatctctaatcattttctttcacaggtaaatacaccataagtactagaatcaatgaatgacaatatttagacaaaccaagaaataatgtgaatataaaaataatgtattatatttgatagaattattattccattaacatagttagtacatatagatggatacataaaacatgacagcaatgtgcacagcagttactggatcctagctatggctctgaagaattaacagcctcttgagcctcaatattttcaaatgtaaatggcagtaataaaacc

SEQ ID NO: 477 - DNA, 376 bp, Homo Sapiens
ttttttggtaataatgggtaacatttattaagtacttactaactgccaggcactactgccagctatttacatacattcactttttaaaatttcacaataactctagaggttattatcattcctattttacaaatggggaaactgagtcatgtggatactaaataacttgcccaagggcatccagcctaaccaatgcctgagcttgcattcaattcaggtagtcgagttccagagttcttgcacgtaacccctgacctgtcatgcctctccacaaacatcatctccgtaaaccccaaggaaaggggcctcatggttatgttttcaccttgagagatgctctctcttcacggatttcttgtgaactggtgtggttgtc

SEQ ID NO: 478 - DNA, 376 bp, Homo Sapiens
atttaataagtagctgcttccagaaaaacagaaaacatggacaataacatcagaaaacagctttaaccaaacagattctaggagaaataaaccaaacaaaactgaataatggaacacactaagaagcaaaacaaagactaaaggacaagagagcgccaggaagagggacaggcgggaggagcacagcacctgcagctgtttgtttcacaaaacaaaaagtacgcagtcttgacaacaaatcctaaacaagcgcaggacacaaggtgtaggtaaatgatgccacttccttctaagacaggaggagaagggaggaaggtaacactcgggagatgtcagcaaggtgacatccaaacattttcctgtggaaagtgtagtc

SEQ ID NO: 479 - DNA, 461 bp, Homo Sapiens
atttttaaatagactttatttttagagcagttttaggtatacagcaaaattgagctgaaggtacagaggtttcccatatacctcctgccccctcatacaagcacagcctccccccatcaacatcccccaccagagggatatgtttgtgatagtcaatgaacctacatagacacactgatcttatttaggccttagttccagctcccctagaagagtgacagttgccttgtggcctgaccctcctgcctggttttgctgcttggtacaaaggcctttagaaattccctggcgtggttgattggctaacaaggtaattgatgcagggccagtgggaggcagaacacagagtaccactgagtaatatctcctctgttcaacattgcagtggggatttctgaacccaaaacatcaaatctgtgtgggaatcgagcatatggaaaatctctgctcgtgccgaattc

SEQ ID NO: 480 - DNA, 397 bp, Homo Sapiens
aatgaaactgcaaatttattagaaagtataaaaattaaaaaacaaaaccaagcctaaccaaaacacaaaaagcaacgacacacaacctttccagtttacattaactttgagcgtcacacactattaaccacttagttgcattttttaaaaatgtcaatttcaaggtagagggagctgagtcaggtaataggccagtcatcacagtgtaactaatttaatgctaaaataaaacacggatctcatttgagaaaaaaagagatgagactattttctggttggcgtagatttaggcaatgtataaaaaagcttcctggttggaatgagttaaaaaatattgctggccactaatgtgccatcttgagttggaaaacaaaccccctccccccaaaaaaaaccc

SEQ ID NO: 481 - DNA, 419 bp, Homo Sapiens
actttttagatttaatttattatttttaatgaactatgtttaacattttacaaatcttcaggttgttacagttttcagcagtaaatatagtagtaacagcaataaatacaccgaaatatgagatttctctgaaagaatacaaaaaatagaaacacctggaaacaagaaggcaaaatgtcaattctagatctgaaatagaaattaatacagctgaattcctttacaatgctcgtacatgggaaaatgagaaactcatgcgccttataaatgaatgtgtgactttgagcttcacctttttaggaagttttgagggacatcatttgacccacagatctctaaaaccctataatacgtattgataccagaggattcaaacacatagtggtctgaaaatgattgccaaagcaagaagtgctttc

SEQ ID NO: 482 - DNA, 264 bp, Homo Sapiens
tggagacagggtttccccttgttggccaggctggtcgtggaatgcctcggctcaggcaatccacctgcctcagcctcccaaggtgctgggatcacaggcgggacatatgtgccaggccccttagttttttgagcaaagaaacaaaatcttatggttctcaaatattttcataattctggtaaaatagttattatttaacactggcccctaacaatatttgggaacgttgggagtatcaactcatctgaattaagtacttacata

SEQ ID NO: 483 - DNA, 563 bp, Homo Sapiens
tttatgaaaggaaagggcatttttattcttatagcaaaatataataaaatacagctgtttcaacatctgaagatcaattaatgtaatccatcacatcaataagctaaagaagaaaaatcacatgatcatatctatacatgccaaaaaaaaaaaaaagcatttgacaaaatccagcacccatttctgattttaaaaaatctcagaaaacctaaattagagaggaacttccacaatttcataaagaacatctccaaaaaacctacagctaacatatttaatggaaacttgaagctttccggccaacatcaggaacaagacaaagatgtccttctcaacattacttttcaacatcatattggaagtttctagccaatggcaataggacaggaaaagaaaacacaaggtatacagactgggaaggaagaaatataactgtctttgtttgcagatgacatgattgtctatgtagaaaattcaaaagaaacaccaaaacccctctcaaaaaaagtgatgatagcaaagttgcaggatagaaggttaataaacaaaagtcaattgctttc

SEQ ID NO: 484 - DNA, 389 bp, Homo Sapiens
gatgcgagggtgaacaccaatacgaagtatggaagagcagaaaaccaggagacatctgggtccctgaggccactatggagctgcactagtggcattggactgctcacctctagactttttaaggtgagaaaaataaagccagtaatttgttgtttaatctgctgttttttggatcctttttttttttgcagcttaacaatatttattaagtgataagctcacagggttgaggatcaaaagagaaccatctatgtgaagagtataaaacagttcttgacacacaggaagtggccaatcaatgataactattatttttgggagattatctgactaccagcagagaacaaaaatcaaacagaataaacaacttgggaagggaagaaaagggc

SEQ ID NO: 485 - DNA, 440 bp, Homo Sapiens
tttttttttttttttgaagttcttattttaattcaacttcaaatggtcacatgtcactagtgactaccacactggacagtgcaggtgtagacggagttcagatcagactcctgaaacttaatggctctaaccttaggcaagttacgttaacatctaagcctcaatccctccaagtagaatgggtgcacctaaatcatagggttgtcctgttgtcctgagcaacattatgtaaagcacttagcccagagcctagcacatagttatctagagttgggaacgtcactcctggtgtgcatgtccagaccctacccgggagaagggcctaacctatgactttagaaccctcagttgcaggtgtgcatgttccagccaacactccactctgagtgcaggctcatcaggacaccatatggttgtaaactggctgccatgtcccaatc

SEQ ID NO: 486 - DNA, 449 bp, Homo Sapiens
tcccgagccggcgttccctatgctctcgtcacgcctggacttgaactacctgggctcacgtgatcctcccacctccaggcgtgacgaccaggcccagctttgagccaagatttaaaggaggcaagggaaagagggatgcaggggcaatgacatgccaggtttatctgaaggcctgtaaggaggccagtgaagttagaatgggtgaggaggggaagtagaagatgaccagaggtaatggaggaccagatcacagagaacactgcagaggctgagaacactaagcctgagctgtccaatatggtgaccactgaccacatgtggctatttaagttaaataaatgcacaaattcagtccctcagttccactaaccacattttaggtattcaatagccacatgtgactagtgtttacctactggacagtgcagatctagaacatttccatcact

SEQ ID NO: 487 - DNA, 384 bp, Homo Sapiens
aactttctctcttttctgggccggacatgtgcttatctaacatttggttctagatttatctaatggggacttcagttgtgagagataagtcagtaggttttggtctgccaaaagcaaccattgtccaaaaaatcttggccgccctcacctttctgagttagataatcttaactggcttgcattttctaattggattaacagctgatctgagcttggattccatttatcactgtcctgcctggctctcttctgttatcttccatcttgttgccttaattctgtcttaattctaaaaatttctcaggcacatttcctttgggacacaagaagctcttgtattcctatctataattatagtaacaactggaaattcatccaataatt

SEQ ID NO: 488 - DNA, 227 bp, Homo Sapiens
tttttttttttttttgagttacgcaacatttcttttattgcctcgggttggaagctcaaattaacctcccttagcactaagttgcccccccccgggcccgccaaaaataatatgaatcctttggggtctgaagttaaatgccccgcacctgcgccctcagccccgccaagcgcttctgccgtggttacctggtgacgcctcccgcttgccgaagcgcaggccgaaga

SEQ ID NO: 489 - DNA, 377 bp, Homo Sapiens
tttatcattcatgatttattgccatataataaatctttcacaaaaatcaggaagaagcctctggtgactttgcagactgaggcagtgatgcacgtggtggggcctccctcctgagcgggaaccaggactgggagcatcacttgcaggcctccatggaggtgctgccccagctgagctgttagctagtgagtgcttctactgtgtgatgaatgagaaaagggagggaggggagggcaatcagggttctgggggcacctcagtgagcccagaggcctggaggagaggctgtatgattccccagtcaggccttccttgggagtgtgccctctgtcaagatgactgggtttttgaagggcctcatttcctcacacaacaag

SEQ ID NO: 490 - DNA, 254 bp, Homo Sapiens
tgcagaaagaacagaattagtgtcagcagtggtactacagaattcaaataaatgcttgtaataacagtgccaggtcccccactgcctcattgcacaagtatcatgaactagtcacttaatctctctgggcctcaatctccttgtttgtaaaatgaaggagcagctctagatgttctcaattcttaggagagggaatgtttctccaggacttcgtggcattgataccatgcttaccaggagccttcttggtgagg

SEQ ID NO: 491 - DNA, 420 bp, Homo Sapiens
gttgttgttgttaaagggttcaggggcaggaaaaaacagtagccacctcttgagaatgggtgaagattatattagataacccatataaaaggccaaggccagtgactgtcataatgagtcatctataaaccttagctataggattgttgctaaaatcaaatgagatgtgagagtaaaaaaaaaaatcacacaaattatgaaataaaagccggactaactgtggccagaaacaaagttaaccaccgccccccgctcccaaaacgattcccaccttggagagaagcctccaatttagtaacatccacatgaggtctataaatacgatgtctacttttgtaaagaccactgaccttgaagcttcctcaccattaagtgagatagaccaagaccataaaaccatctaagaggaaaggaaatgca

SEQ ID NO: 492 - DNA, 484 bp, Homo Sapiens
  misc_feature (453)..(453): n is a, c, g, t or u
gtgtgaggtttttgtttacccagaaaaatcaaacagatctttattaaaggggcagaacaggaaggaatggcaagagaacacagtcactgaggagacaggactgttagaatatttgttcgcagagaaacctgacactatggtacaaagttgttcctgcctttccaattttaattggaacgcatgagtacgaagcatgagcctggagaaagaaccaataatcaggctcgtggtggtgcacagtcccaaaaggctgagcgctctctcttaaggggtcagaggcacccactatagccctggctggctgtgtcatcagaggcaaggtttcaaatttctgtgggtccccgatttcttcataaagtgaaagaagtggacaaaatgaccttgagagtaccttccggcttaaaatacttctatacttagagccttcctcctcaagtataacaaaacccatanagcatcatcaattcaaaggaacacaagagtt

SEQ ID NO: 493 - DNA, 470 bp, Homo Sapiens
gagttctattgcacagcatggtgaatagttaacagagtactgtatgtttcaaaattgctgagagagtacatttcaaatgttctcaccacaaaaaatgttaagcatttggggtgatgagtatgttaactagtttgacttaattattccacactgtatttatagattataacattactttgtaccccatacatttatgtcatatgtaattgtcaatttacaataaaaagaaaaaaagagatccctctacttgtatacacgctattctaaaaacctgtgccaaatctgatcatatacaagagcacagtagtcccagctaccaaacaagacctcagactggcccccttgctaatttactcatctcaccgggaccttatcttccttgacgtaacttggaataaattaccaaactcacacatctaggttgggttttgtctgagatagcaataataaaccatgtgccgagtacagtg

SEQ ID NO: 494 - DNA, 374 bp, Homo Sapiens
gagactgagtcttggtctgtcgcccaggctggagtgcagtggcacagtcttggctaactgcaacctccatctaacaggttcaagtgattctcctgcctcagcctcatgagtagctgggattacaggcgtgacaccactcctggcccacacttggttggaaaacactgatctatgtctatgcccagctttcctatcatgataggctacatagctactttctgattcatcttggctgctaaacttccatcatgttatgatcatttcctcagcctttagcctaattgcttttttttttttttaacgttttgggtgtaattgctcctttctacttgttctgcagccagaagcaaaaggtgaagcagtaagcattttta

SEQ ID NO: 495 - DNA, 209 bp, Homo Sapiens
agacagggttcactctggtccctaggctggagtgcagtgacacaaacacagctcactgcagcctcaacttcctgagctcaaacgatctttctaccttagccttccacctcggcctcccaagtagttgggaccacaggttcacgccaccatgtccagctaattattttgttgttgtatttttttatagagaggaagtctcactttgttgc

SEQ ID NO: 496 - DNA, 494 bp, Homo Sapiens
  misc_feature (442)..(442): n is a, c, g, t or u
gccttagaggttcaactacataaattatcacacgtatgttgttcgttagctgttgtcttcagtgtacactgggcaatagctataaaagcttagggaaatggccatatgatcgagtgattctgaagagaaaatgccttgttaggttgtattgggatagctactgtcaactattgaaataactgtcatcattttaatgagatttgatattgttttagcaaaatgtctgtcagttttggagctcagcacatttttttcctatctacagaagttaatggtaatcatattcttgacaaggcaaagtgaacctatgagatttttttcagaattatctttttaagatggacactgtaactcgtttaatcctcataacagttctaagagataactaccatttattgtcagatatgtatttagcacctgtattaggctgttctttctatanatatctgcgactgggtaattataatttataaaaaagatgttatttggcttat

SEQ ID NO: 497 - DNA, 431 bp, Homo Sapiens
agatgggatttcaccatgttggtcaggcccgtctcaaactcttgacctcaggtgatccacccacctcggcctcctaaagtgctgggattacaggcgtgacgacggccctggccttgaatcatttttatgtgcttattggccatttttattcttgtgggaagtgcctgtttctccattgcctattttctggccaagctcccaagtcacatttcacttaatttttatcctgctgattgaaagcattttaacataaacaggagcaggacagactgtaattatctagatcttgctctgtcacccaggctggagtgcagtggcatgatcatagctaccacagcgtcgtactcctgagctgaagcagttttcatacatcagccttccaagtagctaggactacaggtgtgtgccaccaccccaagctaatttttaag

SEQ ID NO: 498 - DNA, 356 bp, Homo Sapiens
tttaactcttaatcacagtgaatttattattatctcctatgttacataaggaaatgaagttggaaagaccacatggcattttttttaaacattgaaaccctacttgagatcaagcccaaacttgaacctatgttgtctgactatagaacttctgttatttatcagtatgttttattatttttatatattaaaattgaagatcttggagtttaaaaatttttttagtactaccgattgtaagacccctttttatgatactttgtctttatgtaaacctaaactatacttttaatatatatatatatatatatatatatatatatatatatatatatatatatatatatatatacaga

SEQ ID NO: 499 - DNA, 526 bp, Homo Sapiens
ccctaccagctgagaatggtgacatttcttcttctctggtctaaatcagaaaaacttgcagcactacaaccaccagagaaggtatatattagcttacagaggtttttttccccctcttccttaatttaaagaggcagaaaaaaaaagaaagatacaatcctgcttccattcctgtctgtgagaaagtgactgtgggcattctcaggcaaaaaataaagtaacttcatttttagagtaaatgccctgttgacaagttggcagggctgccttgtttggaaaagaatgtgcagaaaactcaaaggataattagtgtgtggtagcctaacagcatgcagcagggctgtaacgtgtctggcagaggcagatgtggccacacagttcattaacgctgtaaagtttgtttaattccagttggggtaattagagaaggctctagaacctgcctagagctccaaaatagactctgatctcagcagcagtggggtggatctaagccacacagtgggcccaggagactagaagatag

SEQ ID NO: 500 - DNA, 321 bp, Homo Sapiens
gtgtggagtacacacagaggaagcatggatttatttttaaatcagcttaattgttgccaataaaacaaagggaggggagaagacatttatcttccacgcagagtaattctagtgttctatgccactcttcatgaagcaaacaattctagcttcttattagttccagagaaactacccaacccccctacagaactacacagtcacagagtgaagaaagctgatagtattggtgatatcctaggtgatatcatcatccaattggtctgggcaaacttcatcatgggataaggagggaaatggagaaatttcagttattgagaa

SEQ ID NO: 501 - DNA, 374 bp, Homo Sapiens
gatctcttagcagaatagatttattatttgattgcttgcagaataaagcctatcctttccctgccttcattaaaaatgaaaatctatacaaaactcattagaaaatcccttcattagcatcactgcactgctggccacaccccgcatccatagcccttgcctcaaccagacaggagctctgacctccccaggttgggaggctggggcggggtcctgctcacccgaggacccccacagccacatcagtgactgcctcctgaacccttatgtgggctccgtctcactgtgatctggagcccaggcttggcttctgattggcacaggctgcgtggggtttggacccatgtgaggacagggtaaaggggaagcacaca

SEQ ID NO: 502 - DNA, 432 bp, Homo Sapiens
acagaaaaattagaatgaatcatttgctatttatacaagaactacttttaaaaattacactaagagtcccaacaatttgagaacaacaacaaaccacttaacttctatttctactcagtttctggggacttggctttgttactgttttgaaatttttcatactttcagaaaaactgcaaaaatagtttgagctttggtttttgacaaacattctttcaaagccggacctgcaaactgtgtcaacttaagcctctcctttactcatttctaaaagaacataaactagaaggcactacaaattcaaagtcctttcagaactaacagagttaggaaaaagaacttctgttacagcagccagctgcacaaacagctcactctcctgggaacaggtctctctcagcaattagatcagcagatgtgaggttttgtgca

SEQ ID NO: 503 - DNA, 411 bp, Homo Sapiens
atcccccccctttttacacaaatggtagtctttaatcttgctttttaaatttaacaatatgtattggagctcattccataacaatttataaagaagtttgtgatggttaataatgagtgtcacctgattggattgaaggatacaaagtattgatcctgggtgtgtctgtgagggtgttgagtcagtgggctgctattccttgaaaatggcaagtgactcatggcagtagtcgggaaaagtacatactacatggaaatgactgcactccagccttggaaacagagcgagatctcatctcaaaaaaaaaaaaaggtattacaatggggaaaaattggtttttaagaaaaggaccatcgattgttttccattattccatgtaaagactattttacatggagttcattgatttgt

SEQ ID NO: 504 - DNA, 302 bp, Homo Sapiens
caaaggccttactaaggatgctagcattatttgctttaacatcaagctagtgacaaggctatgaacgttttgtaaaaagccaagaggccagtgtgaatccagcccagggggtgataatcagtgtttgacatgcaaatattagaaaaccttggcaagactacaaggtttacatgcaagggaagaaagaagatacatgaggccaatacatttgagaatgctaatatatttctctacagttttctcaaaaggaggaaaataggagagggttatttttcctaaaatccaaattataaggcaaaagg

SEQ ID NO: 505 - DNA, 460 bp, Homo Sapiens
gcctttaaaaaaacacacatctacaaatgtgtgctcacaaatgctcaccgacttgctgatgccagtgtttgaaattagagaggcttactgaatttcaaatgaagtgattagaatgaataaggcagtttagttcatctcccataggatacagaaagtaagactgggacaaaattctctactaactcttaagaaaattaacaaagacataccaaagaatggtggttgctagtattgctagtatttacacacacacacacagttagtagaaatccatttaaattacttataatagtgatccacggagtaaacacgattaatctggaaattattggtcttcagggaagtactaacagttcaacagtcgattatttcaagaaggtggctaagagagcagggtgtacaagataggaaaaatgtatggacatattcatagaatagaaatgagactgggcgtggtggc

SEQ ID NO: 506 - DNA, 434 bp, Homo Sapiens
gatgttcctttcattgccaagttacttaaatatcttatcactaggccttccaaactctatggcccagatgtaaaccgtttacccacccctctctctggacctagcccagatcagagatcatagatcgtagatagttgctgcattcaacaactatctcatttgcatctattatcattctataacatcctaacgaaatagaagataaatccaaattagggctagatctcccaacagttataaataagtgccttcaaacatttaaaatgtatatccaaatttacaaatcagataaattaggagaaatttttatccttataagaattacttattttataaaaaattacctcggctctgaagcatttacgctttgagttttcaggtcactaatgaactgccaaagtagcttgcaaggaaggagtggtttatgatctggg

SEQ ID NO: 507 - DNA, 337 bp, Homo Sapiens
gccactatgaacaatgcaataatgaacatctttgcacttttgtgatacctcctgcatttaattatctcacagtgatgtatggaagtggaattattacatttaaatctatgacacttgaatttagatacacgttgctacttttagaaggaatcctatataaccaagattctttatgtttcacaaaagtctccagactgatgctatcatctccaaacaccacagtctgagaggatgctttgtccttccacattcgccttgaggagatagactggagggacccacagctttcaagacagctctaaaatccgtgctttgaagataaatcatgacatggagg

SEQ ID NO: 508 - DNA, 354 bp, Homo Sapiens
gaacagtgataggtttattggtgggaccaaactattcagagaagtatgtgaagacaacttaaaagtcttattactatatataatggataaaatatgtgataagtgcacacgtatacccactcccctccccaacaaacacacacatcaagctaagctgaaaaggtaggtaggaaatgcctcacgtaccagaaatgaagaatctggaggacagagctgagagtgcactgattaatatgggtaacatgctgtgttacccatgtattaaaaccaacttgggttttaatacatatgccggggcagaagggccttaagaaatgaaactgagactctcgcataaaggctaagaccctagac

SEQ ID NO: 509 - DNA, 351 bp, Homo Sapiens
aaaatcagacacttaattttattttaaaagacattaaaagtatgtatttggagggaaacccacccatccacattttactcccactctaaaatatagagaaggaagactttttcgaacatccagctcttgagtgagcaagcaaagaaccaaatataaacacgaacacaccggcgaagtctacaacaggctgccgctttggtggcgtggaatgggctttgcgccagggtttgtatgtcaagtgtcaaacatgccactgacgtgaagcccaaaatatgggctcaagtcatggctggtttcagagtgacatgaagagaagtgcagtgcattttacaaagcaggtgacagacccag

SEQ ID NO: 510 - DNA, 236 bp, Homo Sapiens
atacagaagttgtttattagggaagaaaacatgtcagggagcagatgacttaaggaaatgatgcaagtgctttttgtgaaaggacaaatgaggtcatacaatattattatactttgagaagtgagcttaagtgccaactcaattcttagacaaacgtgtacaaaatcaggcagggctacagcaaccatttttgtcattttctcattaaaaaggaagacccagtagtaatttcaata

SEQ ID NO: 511 - DNA, 303 bp, Homo Sapiens
aacagtctggctctgtcacccaggttggagacagggatgcaatcacagcttacagtaacctcaaactcctgagctcaagtgatcctctcccaccgcagcctcccaagtagctaggactacaggtgtgtgccaccacacctagccatttttgtttgtttgttttttgtttttgtagagacgagctctcactatgttacccaggctggtcttgaacccctggcctcaagcaagcctcctgccttggcctcccatgatttcatttcttatatgggggaaaaaaaatcattatacagatagctctta

SEQ ID NO: 512 - DNA, 407 bp, Homo Sapiens
gagacagagtctggctctccagcctgggtgacagagtgagactctggctcagaaagaagaacccaaaaaacaacaacttgttttgctgtgcggttttgtcatctggcattgggcagaaattttgacccgccgggcaggtgggagaagcatctgagtcagaggtcacttacctgcttgcataggccgctgacctataccaagccttagtttcttcatcactaaagtcaggagaaagaacccactccacctgcctctgggacagctcagaacgtgttaaccctttcagcagtgggtccttcttcatcttcgtggcgctgtttggatccctgtagcgtgacacataaaaaagcacacatccggccttaggatatgggtaggctctggtttgggcacttgagaactctcac

SEQ ID NO: 513 - DNA, 362 bp, Homo Sapiens
atttctcaatacgctatttaatagacacattttctaggcaaatagtatagttggaaaagtcaaaaataactgtcactaagtctcgggggtgagggaagagacgaagtgacacacattctcttataacgaaacctatttattattaaacatcttcgtagaatatacggaggttattttcatccatccattcaaatggtagtttttgagtgtctttttcacatgattatgaggtgctcaggtcacactttcaacgtctctagaagcaataaaaagacacctttcctctcaaccacagtagctgtctattagacgtactttcagcatgacctctgggggtgtggcgtttcttggtgtccgctttg

SEQ ID NO: 514 - DNA, 463 bp, Homo Sapiens
ttagtctcttagatatttattgtaatcttcaagaaataaaacaaactcaaagaacaaaaaccactttctatatagaattcacatacaaactgaatacctaatagagcacataccatttttacacaattaatttcaataaagataattaaaacttcacaatgtgaatacacttcatagctttaaacccacacaagagctcctgtggacacatgaagagtcacaatatttgctatgcagcagtagttttcaactaaatgtcggtcactatatgaaagcattaagctgttttcaatattttcttaagaagagttccacagtgcagtcactgagaaggggccaaatgtgcctggttccaaaggaagatcttcatctgtgcatttccaatgccctttatgggaaacatggagctacagaaaaatctctgggtacacatctgccaggtggcattaggtcggacaatctc

SEQ ID NO: 515 - DNA, 387 bp, Homo Sapiens
tgaacgaaagcagggatttattgagaacaaaagtacactccacagtgcaggagtggcccgagcagctgctcaaggacctggatacagaatcttcttgggtccaaataccctctagaagttgcctattgatcacttcatgctcacctcatgtaaataaagcggtacgctgcaatcagtctgattggttgcagcaaaaagcaaccaatcagaggctagggtgaagttacaaacttatactcctattttttttttttttttgagacagagtttcgctcttgttgcccaggctggagtgccatggtgcgatctcggttcttgaaattctgcctcccaggttcaagcgattctcctgcctcagcttcccgagtagctgggtttacaggcatg

SEQ ID NO: 516 - DNA, 318 bp, Homo Sapiens
taatgatttaacacaataagagtttatttctggctcacatcacagttcaatgcacgttggaagtagtgggaggagagaagagctctgtgcacctaatggttctgctgaatcctccggcagatgaaggaagaatgagagcacgaagaatggaaaggaaagttttatgggccagggctggaggtagtattgatcatttctttccatatttcaatggctagaacacagtaatgtggctgcacctaactgcaaaggaggccaggaaatatagtcctgtgtgctaaggagggaaaggaaaatgctttggtaaactgcttagcc

SEQ ID NO: 517 - DNA, 141 bp, Homo Sapiens
ttttgtagagctgggatctcactatgttgcccaaggtggtctcaaactcctggcctcaactgattctcaggcctcagctccggaagtgctggaatcacaggcaggagcacggtaacccgggccccacaggggtttggggtc

SEQ ID NO: 518 - DNA, 413 bp, Homo Sapiens
tttttttaaacaaatacataggtattttaattatgttctgaactggctagtggtttatattagcttgtcaactcttctagctttaccacaattcttttagattcctctgagatactcccaattactggaaattgctaccttccccaaagaatggggtagccacattccagggcctagtgttggggacagatgagaaagaacagtgacagttcccctttcccaatatccttcacttcacatattacgaggcctcagaaatagagtaaaattgactgtcaatcctagctttatatgaggtggtaagtgaagaaagaaggggattaaagttctccaaaggcatcttctctccaggtgattctttaatgaggatgacagcaggattgaggcttctggaaattctcacacaggcatta

SEQ ID NO: 519 - DNA, 329 bp, Homo Sapiens
ttttttcataacatgaaaacagtttatttctaagttcgcccagttaaaatacggcaggtttaaggaacagcactaagccctccttttttaagagaggaagccttccccggcggcccagcgggaagtgaagtggtgcattaaaaaccaatggagcctcgaaatcctgggcgcaaagcggtctttccaccttggcgtcccgaagtgctgggattacaggcgtcacatctgaacctggacagggtgctgtctgcaccaggtccatgctcacgaaaaacacaggaagttccgatggcgtgcagctgccggagataccgcccaaggtgatgctg

SEQ ID NO: 520 - DNA, 617 bp, Homo Sapiens
ttttgaggtgaaggggccaggttcttttaatgaggcagctctcatctgaattaacagagtgtaaactttttgattaccaagaggatagtacaaagccattcatgagaaatttgccccatgatctaaacatctcccaccaggttccacatccaacagtgaggattacattgcagcataagatttgaagaacacgaacatctaaaccacatcacagaccaactaggattaacagacatgtacaaaacttttcagtcaaaagcaagagaatacacaacattcttatttgcaccttgtgtattctgttaggacacataacaaatcttattaaatttaagaatactggctgggtgaacaggctcataccctataatcccaacactttgggagaccaaggtaggagggatcatttggagccagaagtttgagactagactgggcaacaaagtgagactctgtctctacaaataatcaaaaaattagccaggcatagtactgcatgtctgtagtccaagcttctcgggaggctgaggtggaacaatcacttgaccccagaaggttgaggctgcagtgggccaaaatcttgctactgcattccagactgggtgacagagtaagat

SEQ ID NO: 521 - DNA, 407 bp, Homo Sapiens
tttcagaacttaaaacaagtttattaattttgctacaacactagatgtagtacatttaatatgctgctttgttgcagaaattaatcagcaccagtttatggtttaaattatacagtaccataatgtaaattaaaatatgtgcatatctttttggttgtattaaaaataaacaaaaacagaagttaaattaatgtcacctggttcattttcaccacttcttggaaggagatgaaatgattatcatatgttgcttaagtttattgttagcaaatagatgctatgtttttgttaaagaccaaacaatcagaagattctgaaaagctagacactattgagctggactgatgcccctggacacagtgggccttttcctgaggtggtattgaagtttggcgagaaaagcgggg

SEQ ID NO: 522 - DNA, 545 bp, Homo Sapiens
tctcagtgtatccaaggagacacctggcacccccatgtttattgcagcaatattcacaatagccttgtagttttagcgcttagaggcatttaaacagcctctctcctccagactacttcactgtagtttattatccctgaccctccacaatgtgattaccaaccgctagatgagttgcatcttattataaagtagcaaattacaagattgtaacattagactttttaagaaaatccagtcagcttttatactaatccatcttaatttctaggttactcagaattccaggtattctgatttggactcacatctcgtattgtattgcctgtattttaactaggaagttactgccaacagcatctatctctattaaatgtagaggaattgacaaaagaggggaaagaaagttgttaggtaatagaactgcttcagaaatagggctattcatgtttgaagtgtttctccttcgtttttcagggcatctcattgggagatattcctcttccaggcagtatcagtgatggcatgaattcttcagcacatta

SEQ ID NO: 523 - DNA, 506 bp, Homo Sapiens
ttttcagaaaaacaataccatttacaacagctccaagaaaatagttacaaatctaagaaaatatgtacaagatctgtatgctaaaactataaaatgctgaagaaagaaactaaacatgcaaataaatggagagacacgtcatgttcacggattaaaaggcgatcataaatatgttaattctccccaaacttatctatagatttaatgcaattctaatcaaaatcccagcaggacttttgtagctaagctaatcctaaaatttaaatggaaaggtaacactgatacaatagtcaaaataattttaaaagaaaaataaaattggaagaattatattaccagattttaatacttattacaaagctatagtcatcttgacttatgtggtattggcaaaaggagagatgtacagatcaatgggagaaaataaaaagtctagaaatagacccataccaatatggctaattcctgacaaagatataaaagaaattcagcagagaaaggatagt

SEQ ID NO: 524 - DNA, 518 bp, Homo Sapiens
aaaggcctagggtttagtggaatgggttgaagtgtgctggttattggcaggactccatagcgtgttatccactgagtcatttttgtctccagaggtctagcacctccaggagggctcaaagcatggaatgaccagctcctatattcatttcttggacaagccttttaaaactaattttgttggggattccctgtagggctgctgcacgttgctgggggtcaacccactagacactcccacttagcccctagtaatccaggggagcctttcagctgggagaagcaaaatgccctttagggagctgaggaaactcattctctcatttatctatgaaaatgagtttcagttcctcacgcaaatgcccagagaagccaatcaagattaattttgagaggaaaggcaatggagaagactctgtagaatgcacctctgaattagaattaggatcctaaacaacttcctaggtggaaaaaacaaaacagtgaagactgcttcctgtagactgtcctcagtcagct

SEQ ID NO: 525 - DNA, 329 bp, Homo Sapiens
ttttttttttttttttccagagggaaacatataatatgtttatttatcttagaaaccacagaacattgcaaaaggccaaattggcctgtaaaatgtgttgctaacatgtacagtatgattgcttagtttggacaaagtcaagtcatttctgtgctgataaagaaggatcacaatctatattccggcatctctagaatttatgtctacagctcaaccctttcccttgagctccaaaattctagatctaaatcctccttgacacctccatatggaagttgaatatgcatctcaaaaagaacagattcaaaaccagatatttgattctcagt

SEQ ID NO: 526 - DNA, 494 bp, Homo Sapiens
tgcttttagctttttatttttgtattaacaggagtcttattacacataggtctgataaaactggtttatgatcttcagtctgtttccagtgctgcataactagataacgtatgaagaaaaaacgacgacgaacaaaaaattaattgcttggaagacttagttgaatctatccatgaaaacagaatcaattaaacatgtatgtgttacttagactaaatataaataacccatataaatggtagctcaaacatctcaagtgtttcagagaatgttagaatctattgtttgaagtgtctattgtactctatgcaaaaatccaaagtcatttgcgtctttaaaaatgatatggataatttttcttccgaaatgaagtgaaatcatgattaatcagatatatcagacaatttggtcaacatttaaataagcagctaatagcccacatattaagtgtcttgatatcttagaatgtcaggtacccttgccaggtgtggtgg

SEQ ID NO: 527 - DNA, 166 bp, Homo Sapiens
atagagaagggggtctgtgttgcccaggctagttttgaactcctgggctcaagcaatcctcctgcctcagccttccaaagtgctgggattataggcatgagcactataaccaaccaagaatgcaggctttgagcaatagttttattacttgtcacaaataaagcac

SEQ ID NO: 528 - DNA, 408 bp, Homo Sapiens
ttttcctgtaattacaatgatggtctaaaagtgatgatgtattttaaagttgcaatgaagcaattacaagaaataaaatattggtatatacttctctataacttgaaatgatttcaattaataaaatgatctgatctttaaacatgaactatattcagatatggatctatcttctgtattttaaaaaatcaactttagcaagatattatttacatacaataattgtatctattcagtgttcattttgacagtgtgtgcacccatgaaaccaccaacacaataaaaatacagaacatttttatcaactctaaaagattccttgtgcccctttgctggccatccctgtctctggcctagcttcaggcaactgctaatctgaattttgttacttcactattagtttgcatt

SEQ ID NO: 529 - DNA, 392 bp, Homo Sapiens
tttttttttcatttttaaaactttattaaattgtaatttacatacacatgatttaaatatacaggctgatgactttcgacaaatataaacaactgtataacctgcccccaccatgataatacaatgacttaatcgcccccaagaagttaccgcttgcccctttgcttcaatctcctctaatactctgctacaggtacatgttttacggaatcctgagaaatgtctgtgacctcataattcccaatccatttgagaagaggtatattttcctgaaatttgtaaaccttttcacaacacaacaggtcaagatcattttaaattcctcccagttcaaatccctgccttctaagtagcaatctataaatgggaagctttttttttaacttgtgtcg

SEQ ID NO: 530 - DNA, 173 bp, Homo Sapiens
cctccttgaaattgtcagcactttgtactatcagagtacacttgggaatcgaggggctcctgtgtccatgcctgtggcatctttatccactgatggaggccaggaaggagggggtctggtcattccatcctgctggggtcaggctgggagcaggagagctgtttctgagcctc

SEQ ID NO: 531 - DNA, 452 bp, Homo Sapiens
tactgaacaggaagaaataaaactttatttgaaaataacattcttgtatatagaaaattttaaggaatccaccgaacgatagaactcgtaaattatttcagcaatattacagcaaacaaggtaaatgtacaaaaatcaatttcacacatctgcaatgaaaaccccaaaatgaatttaagaaaacacttcaatttaaaatagcatcaaaaaaagaaataataattaatttggaaaatgtgatacaagattttcctctgaaaattaaaaattattgtttaaagaatatttaaataattagcaaacaccttacacccatgaattggactatttaatattgtagtactttacaatttgaactacagatttgatgaaatccctgcaagtatcccaacagacttctgtctagaaactgacaagctgattctaaaatacacatggaattgtaagggact

SEQ ID NO: 532 - DNA, 269 bp, Homo Sapiens
ttttccacttgcattcatttatttattcattcatttattcttttaaagaaatattgatttgagcaccattctgttctagaggctgtgctggtccctgtaaatatgaaggtgaatttcatttagtttctgccttcaaagagttcacgatgtcttccaaatgctttcagcttctttcctgctttctaagcttttttctcttctctgcttctctgatactccttcctttccaagtccagagagaattagcttttagttttatttctgtcttc

SEQ ID NO: 533 - DNA, 423 bp, Homo Sapiens
ttttctttgcctattgttaattttattaattgattggtgttaaatatttacttaattggtcatggatgcttttttaccacagaatcacacataaaaaacagacacaaacagctaagggtgtatttctcgctgcaataatacccaccactttcacgaagacaccagggtctttctcactttttgtcccaccatccctatgatattggctttattttcatccctgctgatgtgtgacctcagggtggctgctgcagctccagctatcactcccatattcaaggagaaaagggcctcatgaatctagtgctctttcacaagagcaaagctttcctaagaagaatttcacccactgatctcacaccccactgatcaggcctgagtcacatggtcaatcccagctgagcaggacctgggaatcacagg

SEQ ID NO: 534 - DNA, 228 bp, Homo Sapiens
ttttcaggcagaaaatagcttttatttttttttgtcgtatccctcaggattgcattttctgccagagagaattcaagtgttttgtattagattgaatgctgatatttggccagaggagaaaagggtaccttgactaaacacattttcatgcaaatgttattaagcagtttccaccagccaagatgtgttgttgataccagaaaaaggtttgagggagtagcatgcaat

SEQ ID NO: 535 - DNA, 206 bp, Homo Sapiens
ctgtagaattagtagtaatgtacccactttcatttctgattttggtaatttgagtcttcttttttcttagtccatctagccaaaaaatttgggttatctgacaaagtctagtattgttccctactactaatcttctccatttgaagcagtttttttttaattaaatgatgaaactaccccaaactaccccaaatgtccttataact

SEQ ID NO: 536 - DNA, 148 bp, Homo Sapiens
ttttattatgttaacattttatttaatagattgtgacttctgtagtatttcactttccacgtccagtcgatttggcgttgtgcttgcaagcactgccggccacataataagagaaaaatctaatttcaaatgaattcataaacttctg

SEQ ID NO: 537 - DNA, 402 bp, Homo Sapiens
ctctatgtatttaatatatatttataagccatcacaaatgctatgaagatgtacagaggtgttataaaggcatataacagggacccacttggtctgggagcttaggaaaagcttctgaaaaaggtggcatgtccaatgtctatctgcctccctttgggttaagagagagattttctggattaccatactgtagtcctggcagtgaaaattagtcattacaggaatgtccactaaatagtcactttcttactgatagggcctaaagccacaggactgcattcttgctttcctatttcttttacagcacctaggagattggctgaagtcagaagcacttcggcttttagactataggtggaatgccgtgtttccaagactaggagaaaaccagctgttccccat

SEQ ID NO: 538 - DNA, 485 bp, Homo Sapiens
gcagttctagttacttgttaggattgagatgtcattacttttattctttcttaaaagtcttccaaagaacaaagagaaaacttattttttaaaagaacagactaaaactcatgctatcttgcaattatcaaatgagtccactgaactcttataaatctaagaaatatgatggaatcctagtgagcgtattttttccctacattttgaaacaaatgtaaaaactgttgttttttaatagtttttaatagttcattatttataattcattatttataattcattattctcaactatgctaaaaataactaaatagtttttaagatattagttttctcattgtattgtccaaagtatttcatcatcatctttcaagacatcatacctgttgtctacttttagctttcactgaacaccgatgggaattcacaatttttcattttccattcataatggcaaagagaaaaaactgacagaaggcattaatc

SEQ ID NO: 539 - DNA, 221 bp, Homo Sapiens
ttttttcttttctttttagaaacttttatttttacagttaactttctgtctaaggtaagcataacttgccacagacagatgaagtcctgaccatcaacattccaaatttgcttaagagattcagtccattagaagaaaaacaacttaataaaagtcatggcacaggtaacacttggataaagcaaagtgaaccagggtgccattgtaaagttggcacttgg

SEQ ID NO: 540 - DNA, 520 bp, Homo Sapiens
tttttagagagataatatttattctcaaaatgacttagctttgcttgtacttcttcctgctagtatggaaccccaaataacatccaattgtcgcaagagaaatttgctaagcaggcggaaatatgattcaagagcctcttttagcttacagccagaaacttgctgatttcaatctttcccatattagcagcttttatgaaggatcacataaagaagaaaactccaggagaaacaaatcaggactgattttctcaaaactagtctccgttaattcacagttgcctttaaggacctcttaacttcttgcagagtcttgtccaaatttcttatagaacacttctttttctcctgatttggaagctcaaaatctgtgttcaaatttcagttcttgaagttgaataattgatctcttgagcttttagagtgtctgtatgtcattgagaagcttcatgcacttgcccctctcccataatcctcagtgtgttttcagctttcttcttttcctcagattcagtttcat

SEQ ID NO: 541 - DNA, 385 bp, Homo Sapiens
ttggcagtttttcctgtttattatatagttattctaaggtggtaagtgtcacaaagttaacttcaagaggaataacatggtccagtgtgaaacacaaggtacaacattttacaatgaaaccacagcacaaagtaactgaactttcaaaattgggtagttcaatgaaacattttgtcaacccttagctctataaagctctgctgatggacttagttgatggatttaaaaaatatattgctgtgtcaaatgttttaacacaaaatgtttttttttaaagagaatacacatccaatcaactgaaactgtgagcagaaagtatgtaacctctttataaaaacgttatccaaatttacaacattcataatatatttcaaagtaaagagtt

SEQ ID NO: 542 - DNA, 417 bp, Homo Sapiens
ttttaatatttaagaattagtttatcagacatatcagccacatttcaaatgctcaatagctacatgtggcaagggtctgccacactggacagagtagaaaacattcccatcattcagaaggttctcttggacgctgcagatctggaaaacaagacttccatattgaaataaatacaacctcaaaacttttatgctctgtgttccctttagttgttatctacatagaaaattatgaaacaagagaggaacttaccttcttccctattaaatatatggctaagggcacaagaaaataagaggaaaacttatccttcagggcctaaacaaggaaatgaaagaaatctcattcccaatagaataaaaaccagaagcttgaaatgactctggtgcaggaggctgggtggtggggaggagggt

SEQ ID NO: 543 - DNA, 327 bp, Homo Sapiens
cttttacttctatcctgagctaaatcagttgtggtttcatttctttgtggggttttttggtccatctctgttcttgattttagtatttctgattaaacatggttttttcatatcctccttaactgtttgaggatatctgattcagtttggaatgttatgttacaattttcttctgctttgtgactgattttctgggaaatattttcattacctgaaatgagctgatttgcattttctgttttgtaaagtagttttatatggatgtggtctgttctcttctattcctagtaatatcacaaatagcttcaaagtgccctcttctgaagt

SEQ ID NO: 544 - DNA, 274 bp, Homo Sapiens
tttgggagataagagttactttagtttatttgtacaggtctactgaagcaacaatttccaatcctggggatagggttattttcttgtcccggcacagggaaggcatctttctccatggaagttttatggcttgctatatgcaggaaaagacaggtcagatagtcacttctggaactacagtttccaaagtactttgagcttgaagtaatcaatacactaatttgacatattttagagctgcaggcatacttttaactcctttattttccctgtc

SEQ ID NO: 545 - DNA, 311 bp, Homo Sapiens
gaaaaagaaataaactattttaatgtctgataattatggggtagcccttgcattgcaagatgatgatttgattatggacacattatcaacagaattgaatttgcatggaactcaagacacgcttaagatcaccacagcataactgcagatttcaggaattacagtcatagagggtacatcaacttgaagagtagattgagtcttacaggaagtgagttacaataagtaacattaagagcccagctgccagcctggccaacatggtgaaacccgtctccaccaaaaacacaaaaattagccgggcgtggtga

SEQ ID NO: 546 - DNA, 369 bp, Homo Sapiens
tgggttttggtgttttgttttgttttttgttttttgttgtttttttttttgcttctccacagtgtaagttttatggtaaattatttttactaagaatgaatgaatgagtgaatataaagaaaattataggacttctatttactgtcacgtggaatcattacaatcgcaccataaaatgcacttccctgtaattcagcatattgctgttccaccgtagactctggaaagtggttaccaatagccaaaaggcccttctgataaggcagcctttacagcaagcctcccatgtaatcatagtgcttataatttcaagtaattaaaaaatataactactgttaagtaaagtaaccatagtgtttgaaacattac

SEQ ID NO: 547 - DNA, 348 bp, Homo Sapiens
ttttttaacagcagatgtttttattgtttaactcaaacaataagcttatatattttggatacttttcttcaaaaacaaaggcataaaattattttaacaatggcttcatatgccctctggaattctttgacaacttgagtataaacagggttttcataaaaggaatcaatactgaaccaggtctgtgtgaaaaacttaacttttggtattatatagctaattcaagattgaccttcttagtacttacttatcagttgggggaggaaaaaacaaggatctccctgcttccctccccaaaatttataattgattttaatattatagaaagagttctcatctacaaatcag

SEQ ID NO: 548 - DNA, 456 bp, Homo Sapiens
ttttttttccactcgctcgggttcattcatttattactgttttcattgtcccctcctccctcccacccggtctctctatgaaaccggaaagggaaccgcgtggggaaaggggtactaaaaagggggcatccgcctgaggagcggcagacagaggaggacggtgaagtaggagcgctgcaaggagaaaggaaggacacgagggatggagagacagcgaggaccagggccaagggcggcgggcgggagagggttaaaggcaacaggagacaaggtcctccctccactgcctttcacactccggttgcgggagaggccaagcgagaaaacccaaatctagatgaaaaccgggggaggggaggggagcacaggtaggcgatctggactgtggcatctctcccgccttccctgtcgcgcagacatcacccagttttcctgcatccattggatggcttcatt

SEQ ID NO: 549 - DNA, 282 bp, Homo Sapiens
ttttttttttttgaaattaataacatttttatttgacccaatatatgcaaaacattatattccaacatgtaatcagtattaaaaagtattgagataatttttacatcagttttttcgtactaagtcccgtattttacaatatagcacatctcaattcgctatatttcgagggttatcaactagctacgttgcaagagctgagtcaactcaggaggccagcgcgacccataaggggcaatgcatttagagttcacttattaaatgctgacgttaacagaaccc

SEQ ID NO: 550 - DNA, 170 bp, Homo Sapiens
ttttttgttaattttgtaactctcaactttattgaatgtgtttatcagctttaacaggtttttttcggtggagtctaagattttctttacattaggattacattttcagaaaacagagacaatctcaccccttcctttcctatttggaagcctttcatttctttgccttg

SEQ ID NO: 551 - DNA, 367 bp, Homo Sapiens
ctctcattacaaaagttgatgttatttctcgtggtaaattcagaaaaacatcagggagtaaacaatgccaacatctgagcaaacattttggggtatatctctattttcatgtttacattgtcgtttaaaaaacaatcaaacgacattagcagttttacaacattttcctttccagttaaaactgtataccgttaccattttcccatcatactcttcacctacgatactgttttaagtggctgtatagatttccactttcacaacagaattagcagattcccaaaacttgaatatttaattttaaaaaaaattcttaataactgatattaaatttatatacgcaaatctgacacattacttccttagg

SEQ ID NO: 552 - DNA, 350 bp, Homo Sapiens
ttttgtaattctgtttaatttattgaggaactaccacctaagcacttcaaatatataaatagagatgggatctcactatgttgctcaggctggtcttgaacgcctgggctcaagcgatcttccttccgtctcagccttcaaagtgttgggattgcaggtgtgaaccattgtgctcagctgacctaagcaccttttaaagcactcatgatcctggggaacgctcacaacaaggcaatgagggaggctctgtgctgcccccattctgcagatgaggaaactgaggctcagaaagcagaattcatgagccaaggttacactggtgagaaatgatgatgtcaggcctgttggat

SEQ ID NO: 553 - DNA, 218 bp, Homo Sapiens
agaattccacactttattcactcaatagaatgtataaagttaaaactgataaaagaggggaaattgtcaaatctaccattacagtaggagaattcaaaatacctttatcaattattaataggtcagacaaaagttagtaaagatatgaaagatttgaacaacacaattaacaagcagtgccacatatgtagaaaacaatcagaggccaggtgccttgg

SEQ ID NO: 554 - DNA, 354 bp, Homo Sapiens
caaaacttcaggcacgaccctgcaaagcggaaggaatgatggaggtggcagaacacgattgctttctgttgagaagcgtgtgtgcctccaggcagggtggatctactttagcctccttagaccacaaaataatatttctccagattggatgaatgcaggggctacccaaaagattgaacactcagcattcgcacattgctcattcattcaatacctgtgagccacagctccaagtccgtggcacctgatcccttgacacatgggacttctcttgcaacacaaattaatagataaaatgaagaatttcaagctggtggctacagagtattaaaccccaagccactgagcaagggg

SEQ ID NO: 555 - DNA, 494 bp, Homo Sapiens
actagaatggaaaaaattcacttttattacctcgaagatgccaaacagtgccattttattactgtgggaagctggaagtcatttccgaacccttttggcaagggtgctatgtagagcatccagttcagtcctttaagtgtcttctgagaaccaccacacagactgtgatttactgtcttcaggagttaaagggaccctttctaccctgaaacttgaaaagacagatggaggtaagttcctttataaaaaaaaaaaagttgtaagtaaagccaggcagcagttgcagtaaattgagtcctttcagtcactgtatacatacagcagttctgcaataaggggaaaaatataatgggaggagcggctgtgaacgagtgacctcctcaagctgagtcctctctgtgaaccaggcattgagagccacggctcctgatttgcatggattatctccacttgaacagatacagagcagatacatttaaattgagctggcacaa

SEQ ID NO: 556 - DNA, 528 bp, Homo Sapiens
tttaattgcatcaggtatttattattaaatgtcaagtgatgatatattaacttagtgaggtaatgccaaagaaatccacacgaaggcctgaagtctggctgtaaatagctgagagccattttctttgtaactgtcttaggtttggatcacttatccacaaaatgtataggcttttgactttgattgtgtccttctaagtgttttctctgcagatcacagtcctcaaaaaatagacttcctgtcagatgcgcattttcttataaacagcgctatgaaggaggtactttctataaagttttttctccaaagaaacagacacttggacatttaaatactagataagtaacaacagggtaagccacctgagcaagatgtctgtttacattgattttgtatttgaggttttctttcttctttttactttacccactcttctaagttcccacactcaatgtcttcttaaattgtttaattcaaggatttttcacttacttgctgtgtttccctgagccagtcttatttgcttat

SEQ ID NO: 557 - DNA, 307 bp, Homo Sapiens
aaaataggaataattaagtaatccctttatatagcttgtattttctagtatcctttgatttagatctatacaaggtatgcagatttttcaactatattctactaaagttcttacgattctaaaatcactaaattttaataagtaatatataatgctcacagcaaatgtgtgcttccttgaggaaaagagaaacaaaattattttggtaataatgtagcataaaaatctccatttggagtgagagacttgattttaagattgagctgttttgatctcattgtaactgtggccattttcttatcttctc

SEQ ID NO: 558 - DNA, 416 bp, Homo Sapiens
tttgttctttctttgtgttggggatatatgttttttaaagagtattagatggtaagaattcatcagtatattccccaaaacttctaagattctgattttttttaacatagctaaaaaattagcttgacagtggaaaagaacaatttatctggtttcaaaacttctaaggacatacataatcccttcttcttgaattttgctttcatagaggatcttttaatacagttgttggcaaactatttctggaaagggacagatggtaaatagcttaggctttttgggccgtgagtctctgtcactgttacccaactctgtctttatagtgtaaactcagccatagataatgtgtacataaacaggcatggctatgttccaataaaactttatttacaagatcaggatgtggctagatatcg

SEQ ID NO: 559 - DNA, 259 bp, Homo Sapiens
ttttgtcataaacccataagtgagtttatttatatcaaatgaagattgtagcctggattgatacaaagcaataaaaagcaatactccaacctttttcctgtcatgatcctcattgcttaacgtggacaacattaaaggccttgtaccctaaaggaaagaaggcagaggttatgcaaagcaattgaatgtaggtaattgctgaggcaggtggttagtaataagtccggcctatattgcttgagggcaagcagccattggt

SEQ ID NO: 560 - DNA, 299 bp, Homo Sapiens
tttttatttataattcatttatttaatggatactcttgggcatcaatgacatgccaagcataatggtatgtggtggtgatgccaacagtgaacaacaatcacaggtgtccattcaccagtgaagagagaatgtggacacctagtgtcacacacctgctttctcttccattcccacctaaccagcttttgttacacttctcatgtcgagatgctcagggatgtcacggggtttttgagtctgctgttttctctgccttaaacactctctttggtgctgtgtcagggtccctgagaccatc

SEQ ID NO: 561 - DNA, 123 bp, Homo Sapiens
acaaaaatattttcatttaataaacgtctttgcatgtcacatttaatgggaaacaaaatatcatgttaatagcctagtaatacaattttattaaagtcagtataagttgaaaagtttatcagt

SEQ ID NO: 562 - DNA, 411 bp, Homo Sapiens
tccaagttacataattgtgtagcctgtgtatggtataatggtctctgggtctatagcaggggtttgcaaactatggctctgtaggccaaaccctgcttgtagcctatttttgtatggcttgtgaactgattgattttaactttttcaatagttgacaacaaatcaaaaggagaataatatttcatgacatgtgaaaattatatgcaattcaaaaatttgtggagttcaagtgcagtggctcacaaatatgctctgtctagaacagggatacttcacctggaataatttgccttggaattatatacctaattattgtatgtttattttattcatgcgtattttttcctcggcaaaagtctctaattttatgagagtattaagggtatatacaacccaaaaatgttttgaacc

SEQ ID NO: 563 - DNA, 432 bp, Homo Sapiens
  misc_feature (58)..(58): n is a, c, g, t or u
tttcagtttgtgggacaagtttatttccagaagcttctgtgacccagaagcaaagctntacgagctcagagttgtagaatcagcatctcagattataggattataggatctaccaggtcgtagatctcactattgcaagacttcccatgattcaatttgtaaagttctcatcacaactgtgatcatcagcttggactcccgtgactgagaccacaaaccgagtagcttaaactacagaagtttattctctctcggttctaggaggcaggaagtctgagatcaaggagtgggcaggataggtttcttctgaggactctatccctggctcctagatggatatcttctccctgtgtcctcacatcgttgtcccttgtggtgtttgtatcctaatctcgtcttcttataaggacactagtcctactggattagggc

SEQ ID NO: 564 - DNA, 261 bp, Homo Sapiens
ccttagatgtggttagttttattcgcatttctcatgtgcttgtctgcactcttcagtttggattctaaactccttttggggacctgggatccccctaagaacccaggcgctgcaaccccctggggctacatagtgttagctgctgattaaatatgttgttggggcagcaggtaggaggggtcatagttgatgggtgagattttgagactgcagaagagtgtctgtgaagtaagtgtgcacatcctgtggatgatgagtgca

SEQ ID NO: 565 - DNA, 154 bp, Homo Sapiens
taccaatcccatagggcccagccagattctctggggctttattattgggcaaacaccctgacatttggaacactcccatgggcagtccataaagttggtgtccaggctctgcagacatgcctggtgatggtgatggtgcctccaccccagggca

SEQ ID NO: 566 - DNA, 537 bp, Homo Sapiens
tttaaaaataattcaaaacaggtttttaattttcccatttctctcggtttataataggtaattgacataaaggggcaaatacagtgacttccacaaaacatgttgacctcaagaacacattacggtagcttcgatcagagaccaggtagatacgtatgaggttgacggcactggaaactagaatgctgcttcagtgctacccacgttctccataagtgtcctaatcagtagtggccttcagtaattcgattttgtggccaatccagcgtgcgcccttctgttaactctctcaacttcctggtattttccaagcgctctaatagtaccctctttatcatcgcgcataggtgtttaagctcctgtattatatgattctcaatccttcttatatcttgtttccatctctatatccgtttcaagaggaggcattttctcgattatttagcgctgctccttttttctcaggggcggtattacgaccttttcagttgcttttcttagaaacagggaccaaaatcaaagattaaagaggtcctc

SEQ ID NO: 567 - DNA, 460 bp, Homo Sapiens
  misc_feature (198)..(198): n is a, c, g, t or u
ttttggtgtggaaagcgtatctttattagctccacgtgactgggcaagaggcagcaagctggacggtctgaagaaaccaagctgctgtgtgatgtcagttcttgcaaattgacctgaagtgaggctgcaagtcttcttttctggggtgttgcccatcacagttctcttcttactgtggggacccagcccaggggtgancctggactttcagagaccctccagggacaaatgctggagctgcttccttcacagagcggggagtgagctggaagttggggtcaggcggtgtcagttggagaaggtggctcccacagcaggcattgtgcttgacaggtttcctttcaaagagtaataaaacctggatccattcactttggttttgaatggccaaaacaatccagggattgttaagtgctgtgacttaagaaagcatccattctgaaatgcaagatttcagacg

SEQ ID NO: 568 - DNA, 441 bp, Homo Sapiens
tttcagacaacaaagatgtgccatttaattattatttccatgacaatacacagttgaataaatcattatatttgaatgcttcttggtgttgccaagtcctgacccacagggttttgtattaatctctgaagtccaggtaccaggaaagagaagagttattcaccgtcacaagttctcacttagactcattataaaattttctttaaggtgtccacgcagtccctggtcacacttgaagcagtccggagaaatatcagccctaccccagtaatacccagaaggaacttacacttttttttaatcttttcctacaacttcatattttataaataaaaagacaaaaatgtcaggcctgtgagctgaagcttagccattgtaacccctgtgacctgcacatatccgtccaggtggcctgcaggagccaagaagtctggagcagcc

SEQ ID NO: 569 - DNA, 344 bp, Homo Sapiens
tttttttttttttttcacattcttgaatatgttaatattattctccagcatatcaatagtcttccctaacacattaatattgttccctaatacatcaatcacgttagaaacaaatttacattccaaaacaagcattatagcagcactgactacactctaattcaaggattacagttcaaattaagagtagaaaagatgcaggttctatataagattctaccccctgcacctgcaaggctgaagtatggagaacccgtgggactgtcttgaaaatcagccctgggaatgagtgcagactcagaacctaacgagctcagggacttgggcagagtgtgtcacctttc

SEQ ID NO: 570 - DNA, 527 bp, Homo Sapiens
gcggccgcccttctccgcttactgttcccggctccccgacagcacgggtgctcgcagccgggctggctatgctcgcctggcagcccagagcgccgctccccgggaacagcacacaaaggcagcctcccctggcctctagcccttaggttctgtagtctatttctttccccacacccctcccccaagaaattctgggggtcgttccaccgagtaggagatccttggccctctaggcaagtaggtcagcgccccaagactggagctggtctctttcaacgccttagtagactgggtgaaaggcgagcttggttacgcttaaaatgatcgcctacaagcggttctcttggctcaaaacgcctctttcagggctcttatgctagaaaggaaaggaataaggaggagataaaatgacgccgaggccctgaactgttcatggcatccgcggctcagccaagctgttgttttaaaagagcaataaaaatgaattatgactaaacgccttctaacttaatgctttcggacgggga

SEQ ID NO: 571 - DNA, 457 bp, Homo Sapiens
tcctgctagagatgtgatttagtcttttcatgtttttgcccaacctgatctcaatctcctaagctcaagagatcttcctgctttggcatcccaaagtactggcattactggcatgagcaccaatgcccaggctaatattgattttttattgcttttactccatttaattttcaagccttgcttaaattagtattctaaatgtttaaaatacttagatccatttgaatcaaatgaatctaaagaagttcacggcacaggtcaaattgataaaggtgatgaacttgatacagtttttcttttcacaaaaaatcttgcacgactacaaaaaaaaggtagcaaatccccaaaacagagaaaatgtgtgtaaaagcacatgatgtgacacaacacaaagaaaccaagaaattagtaaccaaaattggataaaatgaatcaaacacttgaattttaaaaagtc

SEQ ID NO: 572 - DNA, 318 bp, Homo Sapiens
ttttttttattggatttcagaatgttaatactgttggacagggaactagtatacctgaaagctgagaaaacatgttacagggttttccacaatgttgcaatgcccttcttgttctttatttagattagatgtaaggagccagcagtcacacagcccatataagatttgagggaacaattagaataaagagggtaactagatcatgtttggctatgatacacttatttttttaaatgtttaagtagagaccaaatccaatcaccactttactctctgtggatcatgaaaaaaagaaagcatcaacatgtttccaaaggg

SEQ ID NO: 573 - DNA, 371 bp, Homo Sapiens
gataatgataccttattcttttattttaaaatgttatcttttctctttaccttaaaaggaatcagttcactgtgaaataggtgggaaatatatgaacacaaagaaggaaattgagaccccataaggccctgcacaggccaatgaccagggtgggggttttagttatgggttttgccccatggctaggtgcatgcacgttttgttgtttttacatagtggagatgattcactgtatttttaatatgtatttttaagtaagtgactagtcccaggggtggggctgaactgagaatgcacattctgttaatttaaccagtaaatccgattttcaaattccccttacagggagagaaaggagaatattttgctca

SEQ ID NO: 574 - DNA, 486 bp, Homo Sapiens
gacctttattggttatcttttaatacatatgcttatatcattctcaattaggcagtaagatttttgagatcagggagcttctcctatctttatctgtaccccaccatacttaacaaaatgctttacccataacaggtacctgatgaactaatttctctttctccagccaggtagtaagttctaagggtagacaacttatttattctttctcagcattttgcactgctgagtaggctggggtcaatagaggataattgtaactttgctttgattttgccaccacatgattctatcatattcatttatgacttggtactttttagctcagaacacacaaccaagttttccataaaaggaagctcactaaaggattgaagacttaacctaggaaaatttcagatttgaacccctccatcagtgttttatgttatacaccaagaatttaaaacaaatcagatttcttaaatgaattcaagctaaatgaat

SEQ ID NO: 575 - DNA, 347 bp, Homo Sapiens
tttacaataattgttttggggaataaatgagaaaaactatataaagcattcagcacaggccttaaataaatgacaactgttaaggttattaactactgaaagcatgagatctagttttgccccatatcctatactatcttgcaacaaagggatactaaaaataactgggacacctttaggggggtccctagtttagcctaagtaaaaatttccaggaatcttgaggctaactttaaagcatggagtctggacctaacagtggctgcttacagccaggccatggtagaacttgcctttcaattttctttctgcctatgatagcatctacagcaggatattagctcagc

SEQ ID NO: 576 - DNA, 328 bp, Homo Sapiens
gagcatacttaatagaagggatttatttagaaatgtacactttatgcccataaagcctgcatttctaccacatttacagatacattgtaacctatgattcaacgcatgaatcaggagatgtatgatgagatgggagctcccgcccaggatcctatggcaggcacaccagggtacaccaatggatgccagggcacatcagtgcacacctgtgcatgccagggtacaccaatgcacacctgtgcacgcctggcagggccacctgggcagatgccacagggcagcatattaatggggcactgatggaaattttctcgatccagggccaaag

SEQ ID NO: 577 - DNA, 348 bp, Homo Sapiens
tttattttttttttttttttttttttttttttcccgaaaaaaaacacatttattagaactttttcagcagcattatttccagttgtttatctaatcaaagtaattacagtcagcacccaaaatatcagcaacaaatattttgagaactcgggaataaaataatcagtagtatatgtttcattcattcatccatccatccatccatccattcattcattgtttaacaaatgtgcaatattagcacagagagtcaggtatgctatttgctatgggaaagtgtaaattcctgccatggttcctgttgggcagactatacccactatttaagaggagagctggaaccaggca

SEQ ID NO: 578 - DNA, 377 bp, Homo Sapiens
tttttgattattcaagactgacatttattgagcaattactatatacccctttaagtgcttcacatgtactatctgattttatcttcacagtgacactattaggtgggcatttatttttatccccattttgtatatgaggaactgaatcttacaggagttacaagccactttgctgtatgcaagggcatagagatagaagttaacagtgatgttaacctttgcagattaacctcagatgccccaaaaccatgctattaaatgatttatctaaggtcatgaagaaagtacacttaagatctggaactagattaaaggattactgatttttttatacaatttcttttctatttaaaagttttgctaggaccaatgtagtt

SEQ ID NO: 579 - DNA, 241 bp, Homo Sapiens
tttttttacaaaaagatcaaaatattgtatttagtagtgtatatacaataaaatataaatgtatattattttcacacaaaaaactgaaaacatacagcaatattttaacagtggtctatctggatggtggtttaacgtgatttttattttccttgtattctctcaggttttccaaattttctaaagcaacataattatttttatgatctggaacaatgtttctgttgttttttgatatacc

SEQ ID NO: 580 - DNA, 445 bp, Homo Sapiens
aatcctgctggctaggattcctgtggagtaaatctctgctgaatatgcatgtttcaatcattatagtgtgttcttttctataaaaaattctgcctttgactcatgatagctgtataacacctattttgttattaagtattttgaactgattgacaacagatagttctctgttctgctgcctcagcagatcctgatagatggaaataagccttcttcactgaaaaatctcactgtttttgagcagattctttaacaacagtccgtggaagttctgatgccagttggcccagtgtataggattacaaattcgccccaattcgagaagatatttttcttaattactatacatatatgttgtcacttttaatttttttaattataaaagtaaaaaaaatcaccattaaagacatttaaaaaaataaaatcaagaagataaaagtaatga

SEQ ID NO: 581 - DNA, 393 bp, Homo Sapiens
ttgagaaagaccacattaagtttattacagcatattgttataatttttctattttattattgtcattaatctcttactgtgcctaatttataaattaaacgttatcacagatacatatgagtggggttaagggaagaaaaaacatcatatatatgaatggagtttggtactatctgtggtttgcgaatctactaggggtcttagaacatatactgctcagataaggggaactactgtattttcttgggcaggagtatgatttgcataaggaaaaaaatcacaaacaaaaaaccacacaacaacaaagtcttttgagagactgctttcaacatcaagagagaatgtggggagctgtgatggaaagctataaccaggaaagtcaagaggggaagc

SEQ ID NO: 582 - DNA, 350 bp, Homo Sapiens
ggtggtgtagtgcaacccatttattgtaaatatgaagaaatgcctggttgtcctcctacctctctggctgctcttctcaatctcctttgctggattctactctttttctaccatctaggctctttaggactctgtccttggacctctcctctttccacactcatattatttgatgattctttctaatcttatagcttttaattccatctgtgcactcttgattcacaaacttatacctccaggccagatctccctttggaactccagtcatatttccaactgcctaattgacacccttctgggaaatctaagagattgctcagagtttgcacgcctcaaatgagactctg

SEQ ID NO: 583 - DNA, 348 bp, Homo Sapiens
gtctgttgcctttgttgtttattttaaagcaagaaagagcaaagcaatggaaatataggactgggccacctgctggaggtgcaggcaggggggcagtggagaagaggcccccaccgcatctgcctctggccagaactgggaggataggccatcagcagaagccaagcgcatcaaacacactctccaaatcacagggcgagcagacatgaaggtgctcctggtcacaggggtagcagggagccggactgagagctgagcatgcgggtctgcgctgttccctgaagcgagccgtgacaggtgcaagcagaaagacaaagccacagcacaaggcctccgagctctgaggcc

SEQ ID NO: 584 - DNA, 379 bp, Homo Sapiens
ttatttttgctcaattcatttttatttattgtacattatttgaggtaagggattaacaggtcagtcattcagaacagcccaagagttaagctgacatctcaaactcagttgatgtgtttaacccccaaaacaaaaaaaaaaatgaaccccaaaccccatatgtctagttaattgtagcggcagaaaagaactcagacatcatgtaatccagtggttttcaaccttgactataggttaaaatcacctggcttctccccagagatttcctggagcccaggggaaaattttttttaagttctctggaaattataaaatgtagtcagagctgggaacactgatctaatctaaccccattgtataaagatgaaataacagccta

SEQ ID NO: 585 - DNA, 208 bp, Homo Sapiens
caggagagattagagtattttattttgcccaatcagagcccttcagcataaagagacattcatatacatatatatgaacattttccagaaacattaattaatttataatacattttttaaaataccagcttaacggtatttatttacaaaaatatttcattacctaattttaaactttttgctgtgatgacagtttgtaaagtacagg

SEQ ID NO: 586 - DNA, 427 bp, Homo Sapiens
ctgtgtagacttctttattaagggggctgctggtgtagaactgtctacccaactagacaaaagtccagacatgatgtaaacaatccactctccccaacaataaatgtaccgttcacatatcctttctcagtaagggcatactcttttgagacaaagactgcttcaagtattaaatgaacttacacaaaggcgtataatatataattatctaccattttctatttgcatacaaatgaagcaattgaagtttttcagtcttctgctgaatgcatttttaggagctgccctaactatgctctgagcaagcaagtatatagagtcttgggtgagtgcagacacatgagactacaactgagtatctgttcccaggacagaatccccagccagggagacttgaccagacttgaattgagccccaggaaccaaa

SEQ ID NO: 587 - DNA, 377 bp, Homo Sapiens
atattttatattttaatgtatatgacattctgaaaacaggcaaaattatagggacagaaaacatcagtggttgtctgtagatgtagagggggagaggactaactacaaagggcatcaggaaactttttaagatgattggcatgatagtttcacaaaaacaatatttctcaaaatgttaaattgtactgttaattttgctgagtgaaaattatacctccataaactgactttttaaaaaatggatttaatgattatccctacataggtgcctcttcctcaagtttctttacctcaaaaaatggcatcactatctgcctatttactaaaacctgaaaccaggcaatgatacttgggacttcctttttccttcacacccc

SEQ ID NO: 588 - DNA, 480 bp, Homo Sapiens
ttttaaaaagtattgtgcacatttattataatgataataattacataagaagtaatttgggagaatggggtccaaaatcagctatagtatagtcatgagggttgcacctggaagagactgcctctctgatgttcaaagtttgagaattagtccttaatgaataaatgtatataatgcaattttgaagtttatactttccttgtttgaacaggatagaatcagcactaaacagaaaccagtacaattctcaataacaaattatctcagtagaggtccaataaccctgtgataaatatgcgcctgttcttctccactgtctgacctacttatgtctgcatcaagtatccccaaactgctctgtcaggaatataccccgaagagccctctgagaactggtttaactagtattttggcttgttttgggtgccctgtgacctaatttacaagaccaagattaattaaatgttcatgcacaattaa

SEQ ID NO: 589 - DNA, 362 bp, Homo Sapiens
  misc_feature (146)..(146): n is a, c, g, t or u
ggtcacagagttttatttagtagtaattactgtataacctgcaagtggtggttttccttattattatttgacagaagctggggttagaggagctttagacatttttggttccagttaaacaacaaacagtaataaagcatcagcgntaataaaatgcaaatctctaacaaaaataagatgaattaaaatttgattaatatagtgcttttccctgttgtagagggcattgcattactattaataaatatacatatgaatggcctcatatcagagaataggacttcccttctggctttagaggccttcttcctccttgggatatggcaaatatcttcctcttttcatccagcttggagagtgct

SEQ ID NO: 590 - DNA, 359 bp, Homo Sapiens
attttattacaggtaattggccttttaattgctattatatatgagagcaaaatagaagactgacattttcttattagttccaaataactagataagttaatttgcagatgtataaaatttattgaaatcacctttgacgtgttgtaacatttttaaaaaaatcattagttattgtgctgctgcttctcagatatttttcagtgccacgaaagcttttattatcagttcagtccctgcccttaaggttcatctgacctcccttccccttccacagatttgtattaagtgaatgattttttctgtataagcattgggggggattgggggaggtgggatttaaaggtgaataaggggtaggc

SEQ ID NO: 591 - DNA, 352 bp, Homo Sapiens
tttacagcatgtgtaatttatttatgcaatacaatttaccattaactgagagaggaaaaataaagagaaaaataatatgttttgtactataattacataataaagtttgaattaggaatatcacttggcccacaaacttcctctggcctgagaaagatcagaaagcaacgtcgtctcttcagttccttcctggattctcaggaggagcaggtctccctctaagtgccacgggacaagcgcgttggtggtaaacggagccgcggggaagagtggggcctttgagaaccagctgcattgacggggacatggccagcccaggtcaatcatagagaaaaagcaagagaaatgcctg

SEQ ID NO: 592 - DNA, 338 bp, Homo Sapiens
tttttttttttttgcgagcccctggcagaccagggccaggtcttgtttatttctgtatccctggtttccagggaggtggctggcatgggggtggctggcatgggggtggggtggagatcaagaaatgtgggagaggaaggaagagtatgagtggaaagctctaaactcagccttaagggcaggccaaggccaagtccctccggactctaaagggctcccagagaaagcaaacctcctacagtacgccagacctcctgccgcgcctgagcccgccagtccaatgaagaggccagagccctcgctgctggcgaagagggaggctccaatcggccaccacg

SEQ ID NO: 593 - DNA, 416 bp, Homo Sapiens
  misc_feature (416)..(416): n is a, c, g, t or u
aaagagtatttcctttatcttttagcccttctaaatagttgtctactgttactttttatttgtaagtactcttttctattctttttcttccttaatagcaccttgaatgtaataccatttcttatctctctgagaagacaaaagataatcttcctcaagagtctaaagcattcttctcactgcataccttctgcttcctgatggttcctttttttcctatttgttttggtcactttcaagttaaaagtctttcttggtgggagtcaggtatgaacaggaactgggatttaagggccacacttcagaggtatcccaggactcctttttgccagaattatgggaagataatgttgtgggatgtgagtagtgaaatttagaaaaagcagagagtcctacaaaacatatccacaggaagn

SEQ ID NO: 594 - DNA, 371 bp, Homo Sapiens
aacatcttttctttattcctataacaatttgttggaaattgtaattactgaagatacagttgtcagttcataggtagtaaaagtacgtaaccccagaatttggggaaaaacaaatatttttcgtctgaaattaactagtaaaactcaactcataatgatggggactagtaatgcccagagtaaccttctgggactgaaagttctagtatttcctgaatcttggtcaagactccacatgaagtaattgcaaaggtatggcatctagtaaaatggagaatcaaagaaacatagtttttttttctgcacagtcaagagaaaagcatgctttcttctttctttcactggaaatatccatgtccatgtaggtagtc

SEQ ID NO: 595 - DNA, 461 bp, Homo Sapiens
tttatgtattcttactctagttgtttattaagaatgacaagcacgtcttttcaacatgttagtgaacaacgtctctttattttggggaggagcccggcggacagtagaagtaaacccttgcctgttaattgaactggccgaggtcctgcggggagtgtggggtgggacgtgaagtggcagctcctcagtgacaaggccactatgtgctatacgcatgcgctgtttcttcagcgccagtccagcccccgccgcagcgaggcggttaggttccgcccgcgcgcactacgccctgacgtcagcgtcgcgcgcagcagtgacgaaatcggctggtttatattggcgcggccagacggcagaggtctctgcggcgcggtcctcggagacacgcggcggtgtcctgtgttggccatggcgactacctgattagtgggggcacgttctacgtgcacgacgacggactc

SEQ ID NO: 596 - DNA, 486 bp, Homo Sapiens
ttatatatatcttcaaaattttatttttaatttaaaatataaacaggtttatctacccatcactcctttgatgtcaggataagaccttttctttgcgtgtgggcctgctgatgcacgtgcacagaggacattgattagcacagcaagaagcattatcaatttcagctttagtagaatgaggactcaagacacttgtgaaacaaaatgaaggcaaagtcctatattttgacacttttctctccctcccaaacattcacggttgctttacccacacctaattccacagcatttttttctttaataacacgtcttttatcaggtctttcccaagttttcaactttttttcatagagattactctcttcacactcataattgtttgattttggtaatattgaattaaattacatcgttattaagtacaacttgcaaaaacaagttttggaacaaatacaactgatttttttttttttttttgagatggag

SEQ ID NO: 597 - DNA, 308 bp, Homo Sapiens
ctcatttatctgtttatttataatcaacaggtactactgatctctgttggtgtttttattgaaaattaataagcatgtgatacattttttatcattcttcctcatgatttctttactatatgattcttctcatatgtggtacttaagagtagttaaagtcatagaaaacaccaagtaggagagtgtttcccaggggcttggaaataaatttgtttcttacaaatcttgtagtaaaagtgattctccagaaagatgtgcccaggatattctctcctgctgcatcctccctgcacagaattgaagctgtg

SEQ ID NO: 598 - DNA, 414 bp, Homo Sapiens
tatttttattttttattataataattttaaatatataagaaagtagaaagaatagtatcgttaatccccatatatctacttcccagattcaaaacttaatatttttgccacattttctagtctttaacacaaggttaaaagagaaaacacacacttttgcaaaattactgaatattttacaggatacagttttactaagggttcatgttagaatgcttaacgaccttccaatctaattcttaaagaaacaccttcatatctgacattagaaagaactcagaggacctatggaggcatataattcagacaactttctgcatcatagtgacaataaatataacatataaatcatcatactgacaataaatataacatattaatgtttccaaacagagtatgttaaatgctgtatct

SEQ ID NO: 599 - DNA, 469 bp, Homo Sapiens
ttttttttttttttttttgggcttgcaatcaatatattttaatgactttcctactctccagcctgaaattattcacattgcctcctcatgccattattgaactctttttcgtacgtaaatgttctgtttgatctctgtgaggtgctccttctcagcaacctggaagcagggctcatgtcatctgtatatatctctttaacttgccttatttagcataacgcctcacatcaagttgattcccaatggatgctgattgaggcagaaattcccatttggtcttcaatttgctgcagaaaaattcagtgatgtctatttgtgacctgctcttctgcccaacttccaaataatctttccagtctcaaggcttttgtatgtatgctctgaatctttcccagtgtgagctgtcctgattcctttccaggaggtaggggtatacataaataaggaatagagcaagattgtctctgtg

SEQ ID NO: 600 - DNA, 389 bp, Homo Sapiens
tttaaaaagcttaacattatgcatttattatattgtatagagccatattacacatgcttggtgcttcaaactgagttatcaatgtttttctggatgcaaagccatctgatgctggatgcggatccttaaatactatatttctgcatctatgacctatgagctaaggaaaaaccaaggacaattccagaaatggcaaagaacacttaagaaaaagatgtacatgagacgaaatgctaagtccttgagccagggcctacagaagttaccagaaagcgaataaaaacagaatttttctcaccacctgttgataatagagcctcacatgtccgggtatggacaatgtagaaaaaagaggttgttccgtttggtactgatgcctttctcccctc

SEQ ID NO: 601 - DNA, 388 bp, Homo Sapiens
tttttttgtttttaatgatgtttttaattgacaataattgtagatagtcatcggatacacagtgatgttttgatacatgggatgtctagtgatcaaatcagggtaatgagcatatcatcatctcaagcgtttattatgtgtgttgagaatgttcaatatcctccttcttgctgcttgaaactatataatatatggtcaggagtttgtttttccgtcgtcatttgtaaccgttaacattaggatctgtgagcgtgttttctagttattctgctttattttcctctgctcctgaccgccgttggatagctgagatttcctccggatgggcagaagctcggcctgccttatggcttccgtagctgaacactgtgtcttcactgagcgggat

SEQ ID NO: 602 - DNA, 455 bp, Homo Sapiens
tttgtcggtgaagtgtgctttaattcagcaaaaatacagcattcaatacatatacataacacaatatgtatacggggctgcttttaaacaacgccaaacctttaagtcaaagccttgttccagttgcttgtatattccttctgagcttgtcatccacacacttttttaacctaggtcaagttactgctacgggtgtttttgattgcagaagtttggcagttagcagtaaagaactacctttttatacaaattatcttcccctgaacctgtccaatttagcacacggcaagacagaatatctcatccattcgcctagaaacacgggtccaggctgtaccaggctcaggggacttgcaacgctttcgaatcacttaatgggtgtgatcaagatttccctagccccgtctcagccatttgctaaagaagaggcctgacttgtgttgagacgaaagctc

SEQ ID NO: 603 - DNA, 386 bp, Homo Sapiens
ttttttaaattttaaattatttatttaaagtcactaggtatggggagaattggtccataaagtataaattctatgaaaacaactaaatcattctggtataataaaaagctggatggtatttacaattcacgtttcttaattatgaaataacatgctaacactttcataagatccaagaactttctagaactattatgtaaatcttttaaaaccacaaaggaacaacctatttcagaacttacatacatcatttactagaaaaccactaaagatgtttcaaatctgaaactgcctccttccttccaaactgtaagaaacagtacgctcatcttgaagctttttaaattatttaaattcattgctaatatatttataactacattaaa

SEQ ID NO: 604 - DNA, 421 bp, Homo Sapiens
ttgaattagcttttttattgtcttcaaatgcagtatcttaattatacagtaacaggtgctgaatttatagtacaactatagtagattttgcattcttacattacatagctgtgatacataccttgttatagcagtcagagccagccatctaaaaaaaaaaaaagttggacacaaaagaatcctaacaaattatatacaactcacaagtaggggatagcacaccccagctctttatcctgacctactactaccaagtcagaaaagctcttatttgaatgtatatgaagaacaacaaaacaaagcagaacaatatacaccaacaacacaagaacatatgcacgcgagtacacacaagtgcccagcaaattttacatcattctttaaaaattagagtttctagttgagtgaccactggataatt

SEQ ID NO: 605 - DNA, 389 bp, Homo Sapiens
ttttttttaaattatagatttttattatgttatttatatttcatcagtttttccacttagtgttctttttttctgttccaggatccaaaccagggttccaccaccatgatctcagccatgatgtctctttggcttcctccaatctgtgagtttctcagtcttgtgctgtcttttgtgaccttgtcacttttgtaaagtactggttaagtatcttgtagacttgcttcctttcaaattgggtttgtctatattttctcataattgttgtaagattatagattttgaggataaatatcaccgagatgatgggtcttttcatcatactgtattgggggcacatgatatcaacaagagttattaccagtgattctgtgatcacttggttaagt

SEQ ID NO: 606 - DNA, 490 bp, Homo Sapiens
tttcaccctttatgaaatattttcatcttttaatctcaaaagccacacacatgaacattgttttttaagaaatcaaatatattttctaaatcccagtggtcagttctcagcccccatcttattgcatctctcagtggcattcaatgcaggtggtcacacctccttggccaattcaaagaagagaaaggagatgtggcgggagaagcaggtcacaggaaggggctgggagatgggatctaagatgccagcaggagcctcttgcccagggggtgtaggtacattccagatgtaatcatttgagtgatttctttgaaatccatctttgcctcgagggtggaagctccatgaggccagggacacagccatttcacagcccttagctcagggcctggcacagggaaggatccagaatgcagcactgaccgcacttgctgtggacactgagttcctcttacagcaaacatatggtgaccaccactgtgctgactgc

SEQ ID NO: 607 - DNA, 339 bp, Homo Sapiens
tgggggtctccactctgccctttattcaaatgcaaatgtccagccctgtgagttcagagccttggaactaggaaactgattttgacaggggaaaatgtgaccctagaacaggactatcctcctgaacactgtgccagttggtgtctgcgaactccgccctgttgtgcattctcacttctaagagggtgtccaccctcctgggtgtctgtgggcctcatctgctgagcccaggggtggcaggagcagatcttcaccgtcatttcacagaccaggatacggaggctcacagtagtcagcggcttgctggtctctcgggcattggttcaggctctggccctg

SEQ ID NO: 608 - DNA, 336 bp, Homo Sapiens
tttatgtgtacacaatttattcatgggataaattggacagaatcagcattttgtgccatgaaatttttccttgagtatattccttgtatgggaaagcatcacattcttttcaagaacattctccaatcctttcctcttatgtaatagggtagtggtggtagggagaagaccagatcttcagggaaaattagaagtattaaaagggagtcagcctgggcttgggttggctctagccaaggacccttccatatgcttcaagtctagacctagaagagaatcttctatctgacgtggctacaaagcagaggttcccatgatttccttctcagatttcac

SEQ ID NO: 609 - DNA, 455 bp, Homo Sapiens
ccctacgtatctcatctagccttgcaatataagtgatgatgacttaaaaatttatatcttctgctctgacctgtgtactgaactccccccaaaatactcaactttcaactcatacctccacttacatgattgacaggcatctcagacttagcatatccaaaattgaactcttaatttttcttcaaacttatttttctcagtcttccttatttcaaaaaaattgtccttaaaatgtcaacacagactaaattaaactttatttaataaaactgatagtttcaatagctttcctaaacagaccactgaatttgctaaagtttatcatttgagatttactgaataaatatatctgactccagggttgaggtattgatatctatattgtacacacatacaccacacacacacactttctaagaaataatttgtgtacttgtgatagtatgtaaataaat

SEQ ID NO: 610 - DNA, 365 bp, Homo Sapiens
acaggtgcccaaaatagcctgggcattcttttattaatgaataagcagtgagtcggcagagctggaatggggctttgcatgcatctctttcccctggacaccttcctgagatctgcagggactcttggctctcagaggggactttctcaggagatgggggagctggcaggattggggtgggagcattttcagggcctggtcatgggaaaggggacaaggaggccctatgatgcaggagctggaaatggccccagtgctgagggatggggttcccagcagatgcaggtgaagagatggcaggtataggtccatcccagccactctcttctggctgtgtggtcttgggcaaatggcgtaacgtgtct

SEQ ID NO: 611 - DNA, 345 bp, Homo Sapiens
tcttttaaagtctggttcagccccaatcacttggctgatgggggggaacacgggggcacgttggctggtggacatgggcatgcttcagagaaaagtgtctgaaacgaagacaggaatctgagaggcggctgccaggcagatgacttctgagaacagagggtgtgtgtagcaatcctgctggctggagtggcatccggtggtgtgaagaatcagggggtctcttctggagagttgtgagagggacagagtctgtgctcttctctggcctttttgtttgttgtgtttttgctcaggaaaaagccaaggcaacaggaagagctgaagtctctttgtgcccatagcaca

SEQ ID NO: 612 - DNA, 272 bp, Homo Sapiens
gaatgcttgctttatttaatgagcgctttaaaattattgataaacattttgtggaatcaacagtacctattaccaggtacactggctactttttacaaataaattccatcacttaatattttaagttttacacttaaaaataaaccagtgtgatttgaaaatttctgtattttcttaaaataatattggagacattcgttcaagatggtggatggagcacatgaatttgtctttttccccttccaaaacctcactaaaatgaaatgccaaag

SEQ ID NO: 613 - DNA, 323 bp, Homo Sapiens
tttttctgccatttttaattgtatttagagcaacaaaagattccaagattacaaaaagagaacagaacactagcgcttggagctggtcctgctgcccagtggaggccaagtgccaccgtgagaaataagccccatctaaagagatttcaagcaaaattgtttcttttaagaaaatctttgtgtgatgctttctttctctctctcttatttcttttttccttcaatattgaaaattaatttttatctctgtttacatagtctgctccctcctgctgccagattaattccaaggacagcacaagaatgtcatgtctgaggcactc

SEQ ID NO: 614 - DNA, 224 bp, Homo Sapiens
gatttaaaaaattaagtttaattcataatgtttattatttagatgacaaaaacttatttcatttcctcaccctacctccaccctcctagccctgaaatcaaaattagttatgcagaggcagcataaaataatgaaaataatctagagctttaaaaattgagctctaaagatctttgaaaaatagttttctttttttcaaatgtccctggaagaaagaaaacaaa

SEQ ID NO: 615 - DNA, 363 bp, Homo Sapiens
tttaccttagaagcagtgaacttgctttttatttcagaggctcataggaaaaagagactgtagccttgactcagatgagactttggactttgtaacttttagttaatgctgaaacgagttaagactcctgctggcaaggcatgattgtattttgcaatgtgagaaggacatgatgtttgtggggtcagggatagaataatagggtttgtctctatgtccctatcaaaactcatgtggaactatactccctaacattagaggtggggcctaggtagaaaaaaatttagtcataaaatggtgcgggaagatccttcacgaatgataaagcactgggagtggggagtcgcctgctgcagaggcaca

SEQ ID NO: 616 - DNA, 455 bp, Homo Sapiens
tttttttgaaagttccagaatggagtacgcagccccatttctttgtttgcttattttcgagagggatgtttatcatgatgctagggaaaacttgaatagagaagaggtggtaaggagagagtggggtggcattttcttccatacatctattttcaaaaaggatccgattccagcaacaaagtgtcgacttcactcctccacagccaccaagaagaacggcttctgtggacacttcccagcttgcaaatgtttcctctccgaggtcacacaaatagctgatacatccatttccctgaaataaatgccatcatggaggtcttcttgtagctgtcagaggttatgagcagtgttgatggagtggggtaatgacattgcaaagtgattgaaagggtttagcacgtgatttcctatttggttcagacaaaataaaaccattatctgtgcttcatcttttt

SEQ ID NO: 617 - DNA, 460 bp, Homo Sapiens
tttgaggtctataatttacttggaaatgcataaaaaataaaagggatcaaagcagggaggattaactagatgtgacaaagtccagtaacatgtgaatggcacactcaggtggtgggtgtatatccagacgcgcaatgtaaaattccccatcgctgctgagagccggcaaatgtccgtcgccaggtgttgggggcgaagggaggtctaggcctctgctcctctgcttcagatgccggcagcccgggagagcgcccgcgacccctcggaggctctccaggtgggcggctggggtaaaacacagtatcctgagggagaagtggccaagccttacgggggatggatcaagttgtggaaagaaggggcagagagcagaatgtggcactgggcgaggggagacacggagcgtcctcaaaacagggggtgcctggcccgggacttcctcacccacccccgcccccca

SEQ ID NO: 618 - DNA, 444 bp, Homo Sapiens
tttaatgattcctcagttagacctttatctttcttccttttggatattgctatcatcctgcattattatctctatgctgcagatgaggaatctgaaccctcgagaggttaggttctctacatgttgtcaccagctagcttggagtagagtttagaataaatttcatattttcatttcctgggtccagaactctgcccacagcccccacagagtcagaaaattcaggacagggatgaaagaccaaaatcttcaaggtgggcctggccacaggtcaatcctgaaggaagaactggggctgagttggggtagctggtgatggggccccagagaagggctggccttgccgtgtgtggttcctacatggtgtgtacagcctcgtctgaagctctgcatggaagaggtctctgatgatggacccgtcgtcttcgtttttggccagccagc

SEQ ID NO: 619 - DNA, 498 bp, Homo Sapiens
tggaaacatcctagtaaaaatttattcagacaagaatcgtcaaaggatgctaaaactaggacgggtagatttgatgaggaacagaattgtcaacagggtctcaaagtttctcctcacaaattacccactaattgcaaaaggaaaaacaataacgatacactggagaaactggacatcttacccaagtgatcaaaattagcatcaccaataagggacaaatggacattctgtgcatctggatgtatacctgcaatacatatcacttacagcatttcaaccctcactgcactaccccaatctaaccatgaggaaacatcagaaaaacccaaatagaaggatactctatcctttagctgtcctgtatttttacaatatattactattataaataacaagaaaagctgaggaactgctccagattagagggttatggcaataccactatgatcctggctggaatgtggagctgaaaaaatttcccataaacggcaatggaat

SEQ ID NO: 620 - DNA, 142 bp, Homo Sapiens
ttttttttttttcctcacttctcaggctttattgggctttatttgtgggaaaagggggctggtctcagtttttgcagtgcaaagccagagcgccacctgttggtagccctcaggtgtaggttcgaagctgctggggccccct

SEQ ID NO: 621 - DNA, 295 bp, Homo Sapiens
aatagtgaaacaagggggacttttatttaagaattaacctctatcgtttacctcctttaggcagaattgttaattttgcataccaatagtcaactggcaactgaaatctcaaaatgaggaaaaagcaaatttttacaagcattacctttacatacatatttagatggagtttggcttggttttcttattccattactagtcaaattcacaactcagacttatagctccttacttgttttaggggctaccctattattaaatgatgtttgaaaaatactcaactttttacaacaaa

SEQ ID NO: 622 - DNA, 447 bp, Homo Sapiens
tttcttccaggaaaggtccgatgggccttaaagtgatttatttaagtacagtagacatcacaatttacagggcattcaggctgataaaaaggaatctgaccaagggtctcccaaatcacatttttacagtactttaatacagaaacaaatttactttattttttcttcagacagagtctcgaaaaaaaaagctagtagttactattataaaaatcctctgtattacagacatattttcaattattttagccagaagttggcactgtttgtggtgtccttggtgactcttacattgttctattgcactttttcttcatatcatcttatcaccctatgtgaggtagcaattattgtcccatttttagggatgaagacttcaaggctcataaaggtaaggtcatacagtgaacaagtggcagggctaggggtcccaatccacattcatct

SEQ ID NO: 623 - DNA, 508 bp, Homo Sapiens
tttttttttttttctgacatgtgtgtatttcaacacgtttgatttattggttaagtgaagtcaccgatgatcaaatatccttgatgggaatccccagccctccccattgccatctgcatttagagaatcccaggaatccatgtgggtagaggaaggcgggcaaagaataagagacttttaggtctgagttggtccattagggaattagatgtgtttgtgctcattttaagcagaagaaatacactgctagaggaagaagagaatcccagctcgaatcctgcccactggagtccatggcacaacttccagatggtgatattcagattcttttgatatttctccagctgttgaaaacccaagggagactggcctttggcggatggattaagcgccgctcattcagttccattttacggaaggacctgcctcagccccgtatgaggctgcggggattccaaagtaaagtcaaggagatggggttcctgcctgcaaggagctttccacctag

SEQ ID NO: 624 - DNA, 524 bp, Homo Sapiens
ataataacaaagttttatttatattattggcatctcacagtatcacatggcattctttagaccatctgcggactatctcctaccaccctatgagtacacaaatgtttaggcaaaattccaggggatacaaggtacaaacagctctgcctcagtgacctttcagcctagaagcagaacaagatgcattatatcatctttaacattttaaatcacagtcaatccaacaaccaacaaaagccagttgacatctcactaaaactgtgtttgtgtaaaatgaccctgtggaagacactaatgatactttataaactttaatctgaagcaacagaatccccaggggaaagtatgtaaatttttcagtgaaacttaatttcattttatggacaaaagtatatgtcattataatacatgacagtctggccatgttaaaaaaatcacagtatccaagttttattttgtatttcaaatctacaatcacactttcatctaactgaacaatattaaataacctagaaataagtgag

SEQ ID NO: 625 - DNA, 331 bp, Homo Sapiens
tttttgagtaaattatttattgcactgttattgttggagaaagggtctcattgcaagactagttgaattacacagaggtaatttcttatttcacatagggcattttaaaaaatgacttaattattcacatgtacactaagtattccttttatatccaagatgtcatggaagcacccttgtgagtctaggaaaagaggtgggtttttcaaagattgagtttatactattgaaaaccaagttttatctgtaagaggaaagaagggaacctcccttaggtattttcagtctaccaagagcttccaaatgtgttctctcatttactgcttatctc

SEQ ID NO: 626 - DNA, 434 bp, Homo Sapiens
ttttccatttcctaatatttgtatacacttgctatatttttatttttaccacacataaaaatcaaggcaaatgcaagccatggatcttatacatacaaaggcatgtagaactataatcatatagtgaatattcatgcatactgaggcaggtttttagatgctcagagtctgaaattgcactgcatggtatttccataaaatgtcctggggcatactcggacagaatagctcaagtgcaaattataagcatatattccccaaattgtatcctgtttgaattcatcaaagttgaaatgaaggaaaaaataataagggcagctgtggggaaaagaaagagagatcagactgttaacttgtctatgtagaaagaagtagacaaaagagactccattttgttctatactaagagaaattcttctgccttgagatgctgt

SEQ ID NO: 627 - DNA, 448 bp, Homo Sapiens
tttcgcagtaataaagataaacgtttattgaacactaactacattcctgacatggtgcttagtgcattacccaatattatccccattatacagattgagaaattgagatttggagaggtgaatttgcccaaagtctcatagctagcaagtaagaatattgaggtttcaaacttggggctgtctgatttcagagcccaagcttgtcaccaccatgctcatggggcaatggtcaggagaaagccaggtttccaggaaacttctaaatggccacagtgaagaatgaccctcttacatcctgctgattggatgaccagccttgatgcgatctttagcatcacagtggaagcggggccagaaaaggaggagggcagtttcctgtgttgctcaggacttgcctcatcttgcccacaattttctggggctgacatatatttttccagtaggtgtg

SEQ ID NO: 628 - DNA, 496 bp, Homo Sapiens
tttgaaaaaaaaaaaaccaaacaaaactctttattcgaaagtgaaaagaaagcaaacaaaaaaatgcatgctctaatataaatgttgttaaggggaggatagagataaatggaacaatctggaatacgttttttaaaattaaaggtaaagaaagaaaataatggcagatcatgggaacttattatgaaaaataaatacccgacttttgacatccttgagtttgggcagaatttctaagctatatccatcggcttgtccccgagtcctatttcctccattcatataatttccaaaagccaagatgagagctaaaatatccttcacgctcttcacgtgcagcaagtcctgtgatggcaaacaccagttattacggagctgaactccaaatgcacccatgttcattcagtaacaaatatcgactgtgtactcaataggctgtcgggaggcttggtaccaacagaattaacagttgctgaaatgaaaaacacactttact

SEQ ID NO: 629 - DNA, 446 bp, Homo Sapiens
tttgaaaggcttaaaaattttattttttcaattcccaagaaaatcggagacaggcaagtttcttcatagcctcctcctgtttgccggtggggagtccaactctgcaggagttcttccatggagtgcggcccttttagttgtcaggttgtatgtgtatgggagggacgagagggtgggggaagaaaattaggccacccatcctattttgtctcagccttcatcttatattccttatgcctgtaaaatcacacgctctaggaccttgcgcttcataatacgagtccgcagataaatgatatcagcacctcctgggactcagaaatccaaaatctcaggcactagctccaaaagttgtccttgtggatttttctttactttttgtttcggcttcctttcctgtcctaccagctttacgcttatataaacatttttctattttttttctg

SEQ ID NO: 630 - DNA, 387 bp, Homo Sapiens
ttttttgctgccttaaatttactgcttagtttatttccaggaatcttaagatcatcctggggcctgggaagaagcctgtcagtgaaaccctcaccaagtatttcactcgggagaaatccaagtgcagggcttgtcaaagggaggaaaatccttaaagtagaggagacagttagctgagagtctcaggtggatactcattctataatttaccactgacccagtcccctacctgtggtatcatgagaagagggaggctttcaagagatcagcacacctctgggtgaatcttgaagtatgccaggctctgctgcctaactctgggtgtcgtgtctggaagaggtgcactagggatggcaggcacagagggatggacacaggcaattggct

SEQ ID NO: 631 - DNA, 365 bp, Homo Sapiens
ttttgagaaccacgtctgttttattcaccgatgtttgcacatagtaggtgctcaatagacgtgctgaatgagtgagtattcctgcttggtcaggctggtctcttgctcacttctgtgctctatctctgttgcattcttgcacaagtgtaaggagtgagcctaacttcgagaatgaccttctaaaccccccaaggtcagttagaactgtcctctcccccagtcctgaccacagggctgacctcgtctacacctacagaagagggaagaatcaacatctagaaaatgtcctagagagtatcatctctgatcctcactcatctcgatgtctaccatcctcttcccatgaatgaagacatcaatgcctt

SEQ ID NO: 632 - DNA, 469 bp, Homo Sapiens
ctatctctttttttccatcagccgcatgaggaggttattattattattttttggacctttcaaagaaccagatcttggatttactatcctctggctttcatttgcttgagtctttatagtttgcaaagtttccattttcagaagaagaaagagacccaggaacattctgtggcttgctcaaggtcccacagcctgctagcaagtggctgaactggaatttaagctaggcccctgactccaggctgctccaagagatctctgagccaagcttttgaaggcaccatcagtggtgcctgggatctccggggatctcccagcaattttgtcttcttttaggtcacctgtccctttacctgctgcttcagtttcttaggcacagggcttctctctggtaacagacaggaagctcctctgaggctacgtgcccctgggagactgtggggaggctggaatctagagtcagatgacc

SEQ ID NO: 633 - DNA, 437 bp, Homo Sapiens
gcactcctttgaatagtttatttcagaaccaacagaggggatggtgtgagtgaatataaaataattaggtttagagtaatgtaacaaatcattatttaaatgttctgagatttgtagtctaaagtaactaacagtcaacagaaagacaacatccaaaattgtatagactggtactatgccattcacaagggggaaatgatagccactgtgttcatgtaatttgtttcattttttttgaattgtattaagtcaagaaatgtacatcatctagatatcagtttaatgacacaaatttcagctcagaagctagaatgcaagtccgcaagcaagtcctgactgcatatttctgaagttaatttacactaggtgctgattctatttttccttcaattttgattggcttgtctgcaagtacttgtgacttttttcctacttga

SEQ ID NO: 634 - DNA, 440 bp, Homo Sapiens
tgaaatggtaaggaagactttattcaagactattacaagaggggagagagattgcacttactccaaattcagcaaagatagctatagatgtattgccaatgagaagaatgaaaaggtcagtggatagagaattaacaaaaggagatatcaagggtagggggattcttgctaaaattgtctaataggattcttggtagagggaagccaaggacttagacatcaagggtggggaataagaaacttgatcagatatcaaaggtaattagatataaaaggtgcggagattctctctaaaataacttagcaggattcttgcctaatggcagaccaaggtcatgccctggttaagcagaatgctcagatgagcccaattaaagtttggtcaaggaagttgtcttagtctgtatgtgctgttataacaaaatacttaagattgggct

SEQ ID NO: 635 - DNA, 444 bp, Homo Sapiens
gcggccgcgtctgcacctcctccctgcgcgccgcctgacagcctgggagagaagcgccctcagagagacatgttgggccgcggttctcttcatccacccatccctccgttcatgacatattgctccattatcttctttggctggctgctagggaaaccccaggacattacaatccataggcagaagaggcccatagatgactgtcctctggaatcttccaaaagagtctgggaagcttctccagagactagggacaccaaaggattggaagacacgagtgaagacagatccaaggtgaccctctttacgggtgagaaagcagaggcatggagaggatccacactttgcccaaggtcacaggttggatacagcagagctggataggagtctcggttacctggcaaggagaacaagggcttcatagatccatcaccgtctagagca

SEQ ID NO: 636 - DNA, 403 bp, Homo Sapiens
tttttgacattacaggacatatttatacatcatagtaaaaagacaatataaataaaaacaaacaaattcaaatgctgttcacaaatcttcagaaacaccttccagagccagatggaatcaaagtggagcaggactgcattcatcatcaactctgaggctgcagagacagaagccaaaaagaaatgtaatgtagggttttcttcttaccaaggaaaattctgtggtaggcagcagaagcacatttgttgctgtttgatagttctgtacttattttgcacttttactcattcggtatgttaaaaagaaagcatttggctgtagaatcccttctttaggcaaagtcatcaaaataagaagcctttggaacttcaatgaaagacagaaattcttctcagactgaaga

SEQ ID NO: 637 - DNA, 473 bp, Homo Sapiens
tttactgttaagttttaggagtttttatatattctagacagaaatctttgttgaatatatggtttacaaatattttctccatctgtagcttttcattgtattcacatggttttcacaaggcacacatttttaattttaatgatatgcaatttatcaatttttccttttacacattgtccttttggtatcaagtctaagaaatattttcctattcctagattctaaatattttttttttctaaaagttttgcagtttcacattttacattaagtccatgatctttttttttaaacctcaggatgcccagcgccatttgagaaggctaccttttctccacttaattgttttcacacctttgtctaattctggtttctctataatgttttgttaacctttgtttctatccttcttccacactatgttgactaatgtaactacgcaatatgccttcacatcaagggtgattcctctc

SEQ ID NO: 638 - DNA, 474 bp, Homo Sapiens
tcttggcctttacccccttccttattacaaaaggaatgtgacaaaatatacataggccaaatgctacacccttttaacacttgatcagcaacagctttcagcagggcctgcattccagcaaggctgctggattcttggggggaactcgtctctccctcacactttcctgttacattatgcctggccgattgtggtgaaggggatcttgatctactgagacagccatgagatttcttggagcctcgatttggagggagggaacttggccaaccatggagagaagaagccggctgtgtgccagcctggaaccggcgagaggagagaaatggcgcacacatggctatcgcgtgccacccggccacccgtgagggtgcctgccaatcctgcaagcaccatctgccttcacacttgcaattttattttctttcacatggaaatggaagttcagatattgtgcgatggtcttagcacagg

SEQ ID NO: 639 - DNA, 499 bp, Homo Sapiens
tttgtctttcagggctcttgcaagctcttctctttattgagaaagggaaaaaagacatcagttgggatggcagctccttgattcctttatcaggtcagctttttcctgaagggtctccttgcccctcaaggcatctcctcatctgaaactcacttcacactgtgatggctggatgcagggatgctcttgttctgttgccttggtaacaacttctgtttgttgataacgaagtttactgtgtatttgtcattgttttccctctgcctcatggtaaaagaggggtgaataaacttggagctccttcctctggggaaggagcagcggagggctgtcatcaccactgcactcttccaacctttctcttctgctcattcaccagttccatcctcatctgaccatattactccaggaacttcccttttcccttgtaaattctgttccatttttggccaaaccatggtttgcctctgctgcattagtttgaagtcattttttttcc

SEQ ID NO: 640 - DNA, 218 bp, Homo Sapiens
tttttttaattcagcgaatgaaattgtggattcaagccttctctgctcacgaaaggctttctatgggtacattgttctcaccttcttagactcaaaagggcttcaaaaacctggtggcggcatccaaggctgggttgggtgcatgtttttgatcttgaaagtaaaagaaaattgttcggatttcattaaggccttttaggtctgtctgtagatcatta

SEQ ID NO: 641 - DNA, 514 bp, Homo Sapiens
aaaatgctgactggtgacctactagatggatttcataacccactgtgtcttgactcccggacagtgtgaaaacctacatacaagctcggcttccagagcctgatgctccaggctggaccctcgtcggctcaggcaagctgctctaaccaggccccactccagctccagctccccaagatgggggttagaagagcgtcaacatgcagggagggccacagacaggctgggctggcatgaggtaggaggtaggaaccacatggctgagcaagagcctgggccaggtcagagactcgcagcaggacagcagagggagcaggggagtcccaggagtagtaagggcctgggaagagctacagcttttcaggccatctcctgggagggagacccagggacaggcacctgggaatcctgcaaaccatttgtaaagatggctcccttagccttgccccagcctcagccccagccagactccacttctgcctttacaggaaacttatcacacactacccaagag

SEQ ID NO: 642 - DNA, 439 bp, Homo Sapiens
tttagtatgtcaagatttaatacgaaatattcaatgactggcaagaacgcttgggaagtagccttttctctttcacttgtccagcaaataaaaattgcatgtatgtgacatacatacctgtatgtcgcaaccgtaattcagctctctcttttttactttttctgaactgataacctcccaaagttaaatctaagcactgaaattctcccgcggtggaagcagtggcgtgtcattaaaaaggagcttgatcctcacctaaaccacactctcatctttcacctacagagcccaggaaggaaaacatttccctctaagtccgacagaaccgatccagcctttccggatgaaatgccaccgaccaaatgttcaccgaccaaagggttcaccgactccaagggctcaccactttagacggcaatcctgccaagtggaccgggaa

SEQ ID NO: 643 - DNA, 359 bp, Homo Sapiens
tttccagtaaaacctgtttaattggctaaacatggtagaatgtaataatgaacagctttattttttctatcattcttcaaacataaagatcctcttttccccatgccttggcaaatcccttagcttcccagtcatagatttttctgtttgggttcctcctggaaatttttccttgggttctttctagaacagttgtttccagccaccttgctagtgagtgtccatttggcctcaatagtgatgcactcctgcctaagaagatatgcagcttggtcctactgctgacctcttttcttgctgcttcagcagattctgggacaatgttgcttcggtaaaggatgaggtctggcagcttaaag

SEQ ID NO: 644 - DNA, 434 bp, Homo Sapiens
tttttttttttttttttttcatggagtatcctttattgaatacatccaagttatcactacatcaaaagtaaacctttaaaacagatatgtattttgggaaaaataacgcacacatttcagttacaaaatttcctacatatgggttatatacaatattaaataaaatgcaaactaacatgatatgtacattgtttagggagttaagcttttccctgttattgagcccatacaagctcaagacagagttatcccagtctttgaacagaccacactgtcccctgacaaccgaaacagtaaggcttcctacacagtagcagctggctttatcatgcacgattttaaaaacacactggaaaaggcaacggcctctggctacggcactccttaggcagtgcttacctgagcccacgtggcctgcgtacttgactaggcac

SEQ ID NO: 645 - DNA, 435 bp, Homo Sapiens
ttttttttttttttctcattagaacttgttttatttgagcatgactcagtaccccatgtaaatgcgaggttgttaatcttattactatatggaaaacaaattaattggtatgcatgcttttgacatgagtttttaggttggtgttggaaagattaggaaaatacactcattactccaaatgatatctgataatacacgtctgacttccactttaagatctgttccaatatatgggcaacaaatatagctaataaaaatcaagcttttgtgttcagcatctaaatgttcatgttgaccagattcacacatgaataactgcttgtcactgtccatcatccagactcacctgcagcagacagcttctcagttctcaggtttgagctcatgtccaatatccaaaaccagctgagatgatctcttttctcttcttgccta

SEQ ID NO: 646 - DNA, 437 bp, Homo Sapiens
ttttccaatgtttgcataacaagtttactcttgctggagcatttggagagagaagttccagtggaatggcttggaagaggtctaatgtgccacgctgatgccttgatgagaatgataaagtccttttggtatttgcccaaactaaacactgccttttctcttctttccaaccaccctgcagaggtggagacggctaattggtaatccaatcaggtatccttgttatgtacattggttcatccctgtgaatcatctggctcctacagatagcaaggcagtttccaaaaacccttctggcatgttcactttttagaaaagagatgctgcctctgggcaatagccattttgcaaaggaaaaaagaaatgaagtcagagggtgatgagcatcaaccacccagaaaccaccgtgatgtgtatgcatgagtctgcagccagca

SEQ ID NO: 647 - DNA, 441 bp, Homo Sapiens
tttttttttttttttttttaatagtattgttttacttcaagatgattaaactagccagctggattagagactcaaacattagtaatgtgataagcttcagaagctgaaggcaaaaagcattaggtcagtcccatgggtccttgctggcttcaaaggagtggcctctatttgatcagtgagggcagaggtacagaacctaagttctttaatgatttgcagtatcatcaagtccccaataagcctctatttgaaagttgcctgaggtgactttctctttaatttgcaaaaagtgttcaatatccaagtagtgacaaattgaatctggcccataaagaggggagaaaataatgtgacataaaacaagcttgtgtttggagaccacaaggaaagggcaggacaaccttcagcagctggaattcagtgggtattcctttaagcttt

SEQ ID NO: 648 - DNA, 437 bp, Homo Sapiens
tttcacattttgaaatgaaagtgcagacatatttaattcattttacctgacaacccagaaccgtccaaatcaaatacaggccttgttattacagagcaatcaagtctctaattagggctggcatttcacccatatcttcctgtcattaccatggcagcttgtgcttttgacagcctcagaaaaagcagtatttagagcaagatggattgggataggatggtatatatatttactctgagatctataacttgagaagcttctcttgattcatgtatcagtagaatttgggatatgtcgtttgtttaatagacaagagcttgacggagcactgtggtgtgctggtgcctcacttcacttcgtctttcttatctgccaacggagacatgcctgtttcaaaacatcgctgctatttcaaaataatcagcagcaggacacgc

SEQ ID NO: 649 - DNA, 380 bp, Homo Sapiens
tttttttttaggtgtctaaaacaatagaaatttattctttacagttctggaggctataagtccaagattaaggtgctgtcaggatctttcacaaaaaccctagaggcctgcactgtgagtcagctctaaggcccagcaaaggctttaaacagcatccatgtctgccactgttacttcaagtaccattggatctgctggatcatatggcccaagtcgcagagcagcttgcacggcagcctggacctgctgcagaaccttctttttttctggctccagtcaaaattagcagctttggggtcactcagtaaataggtttttgtagcatacccaaatgaagaatatgttgctttcaaaattcaaagaggctcaccggatattat

SEQ ID NO: 650 - DNA, 280 bp, Homo Sapiens
tttttttttttttttttgagatttttccattaaatattttttggcactgggagactgaaaccatagaaagcaaaaatgaaggtaatgggggactactgtataaatgttttctaagtgtattttcattgttgataaacatagtatcaagcacactccttctcaccatctgtataaagatagtccttagtgctggccaggtcccagcactgtcggggtccagcatggtcagatacttacggcaggagtttgagaccagcctgccaacatggtgaaaccccct

SEQ ID NO: 651 - DNA, 137 bp, Homo Sapiens
cattttaagcacaaaactcaatagatgcttatttatttataaatgatatccatctgctagtctaaattaagtgtttataagtttaatgtcttcatgtgagataaaataattttaatagttttatctgatcccaatag

SEQ ID NO: 652 - DNA, 379 bp, Homo Sapiens
ttttttaggtaccagcatcaaggggatttatggtaataagatataaaaccaaggaaaataacctaaagtctgaaaaagaccagaatcgaagtttcctgattcatattttaatgttttgaaatttatactccaggctgggattacaggtgtgagccaccacacctggctgagttcaactttttgtaagtagtatccacttaaggcatttgctaactcctaattgtgtgtgctagggctcagacacaaagtttttcactagccaaagttcaacactctgacagaataggagggacaaatattgtagtttatggtcttcaaaggaggagagagccatggtaatacaccctaggctttcaacttgatatctgagaaaaatttt

SEQ ID NO: 653 - DNA, 123 bp, Homo Sapiens
tttggtttttttgtttttttcccaacattttgtatctttaataacatacacaatggttaccagccatattcataacaaaagttattcataaaatgtatctaaaaataacattttttttccttt

SEQ ID NO: 654 - DNA, 561 bp, Homo Sapiens
  misc_feature (441)..(441): n is a, c, g, t or u
  misc_feature (455)..(455): n is a, c, g, t or u
  misc_feature (558)..(558): n is a, c, g, t or u
tttctgtattaaacatcataagagctttattttcccttgcactcccatgagaatgacatcccatattgtcacagcgtacctcactgtaagccccacaagagcaggtttgctgctctatatccagcacctagaacaatgtgtagcaagtaataggtgctcaagaaatatttgatgaatattttactgagtaaatcatttactgaataaactgggctaagaagctgaaactaaagtctcagtaatcaaaagaattgagtaatcaaacatgttttcaaaaataatttactaaccagctattacgtgatacttgctcatgtatcactagacttcatacaacttaactgctatgagttgaaatacctcaaataaatggcgataatgcttgttctatctgatttacaggattatcttgagggaaaataagagcttgtttgaagcctntaggccatttaccnaaaaaaacccaaaaacaaaaacaacataaaaagccaccagtcctctctttgcagactcagaaagcactggagatgatagacatagctactcgcagacatgaanata

SEQ ID NO: 655 - DNA, 322 bp, Homo Sapiens
actaacaaaacattgctttattgaaatcttagatgtttccgcattttatgtctacatgttgagaaatggcctcaaccataatcaaaatcacatttcccttaaaagcagcatgttccagacactgtgttgagagtcttccacacgttatctcgccaatctaggctttattagtcttatttacagattaggcaactgaagctcggggaagttgagtaacttggcggggatcacatcacaggtagagcgtggagctgatccaccagctgatctgaatcacatctccctgcagagcctgggatctgaatccaccactgaggctggc

SEQ ID NO: 656 - DNA, 451 bp, Homo Sapiens
tgctttatgaaaggcacaattcaatgcagagttcttttaaacaggaagtgtccctatgtacctgaagtcagataaaaataaactcaaattctattatgtaccatttttttcagtaatacatacacgggataaagaaaagttaaatgatctgttgctctggcctcagtgatttcatgaaatccaggaaagaatttctctgcccttctttcctctgtccccctggtagaatacagcagacagagaaggaacactcaaacaagacgaatttattttctcagaaaaacttcttcagaattcacatttaagtgagatagtatataatgaatatatctacatttttccaagttacagtctccaagctgtacagaaacagacttaaggcactaaacaaataaggaataaaaatgaattataaaggaaataatatcttttaatggagaataaaagagat

SEQ ID NO: 657 - DNA, 425 bp, Homo Sapiens
tttttttttttttttttggacatcgagttctttaataaggcagcacagcacattagacagtatcatacaaaattgagtacaatatatcatgggatttacaaccaggatttccttttgtctgcaaaacttgttgccaacctgactgtggcccccacttgcaagtgaatgtagaatttaaggcagttaaaatgcagaatcagattagcagcaatctaaagatctttttagtattgcgatgataataatttttaataaacacactgcttaatctgaaaaacaagatcagaggatgaattgttctttacagactatgaatagatctgttacatttaaataagtcgttattcccctgagttataattctacagtcaggcatataccataaacatgttatatttggcataaagtactttagaaattaaaaa

SEQ ID NO: 658 - DNA, 324 bp, Homo Sapiens
  misc_feature (279)..(279): n is a, c, g, t or u
tttggaatctcaggacaaactttatttggcccatagaaggttttacagaattctgagtttggatgcctttagacagccaatctccatttcaccgcaatccccactgctccccattgcctacctatggacccggcactcatttctgtttcctcctgccttctgtagactctaacgatgtggtgcctgctctggggagtggagagtctctgaagggtttccaccaggtgataagcatgatcatgcctttgctttacaaagattcccttggtgatgatgcanaggaggatggaggggtatcatggagacagacgagtccttttggag

SEQ ID NO: 659 - DNA, 386 bp, Homo Sapiens
  misc_feature (362)..(362): n is a, c, g, t or u
tgaacccagcttcacatcagaatcacatgaaggtgtgtaaaaaacaaaacaaaacaaaaaaacaccaattcctaggccccaccagttaaatccaaatctctggtggctggaacattggcagcgacagtgttcacagctcccagatggttccaatgtacacgagggttgagaaccatagactaactttttctctactctactattaatatgattgtttttgcaactttggcctaggttcacagatgggagaggcatacatatgagaagttacacattctgtttagaatgtctcaaagtggaaaaacaggtaagagtaatcggacctagaccagagagacaatttgctctacatcgttcaccanaagctaaaatggagtaaccggatt

SEQ ID NO: 660 - DNA, 370 bp, Homo Sapiens
ttttttccatctttttatttaggtacaaccctaaagaatctgggatgtcaataccgggcacgcgatccattcactcaagtaagccatatccagcttatgcggatgccagctccctgctgccccagttaagaattgagagccttgtgctgaaattaccaggagctgtatcttcactctgtgtctgtgaataaaaggaaggagatgcataaccaagtttgtgcgggcatgagcctgcagggctgttcactgccaaaggattcaactggaactccagcatctaatgcttcttttcacatcttcctggcagctcagtgtatttgttggccctcccaaggcttgacaaagagcacatgtggctgtctgaagcttg

SEQ ID NO: 661 - DNA, 438 bp, Homo Sapiens
ttttgatatctctttatatttgacagcaagtaaaatgtgaaaacagcagtgttgaccatcttgagacaaataaacccacagtcccttggtggtttgtggggcaggcacagaatgcttcatttcagccaaattcaccatgtgtgttcagggcatcggtagtcaggatgctaaggtgaaaagcgggaactaagattcacgcattcagccaatgctttatactctgtatcaggtgcttatctgtgccttagtcttgtcatctctaaaatggagacatgagaacctacatcagtgcttgctactacatgcacagctcatggaataggatttggtatgtaataagtgccagtatacctgtctgcaggtaggagtgtaaatgacactcccactttcaagaacttcattatctcatggagaagccacaggatacatccatgaaac

SEQ ID NO: 662 - DNA, 414 bp, Homo Sapiens
tttagaattgtcatatttcacctattctcattcattcatctatccatctgtccatccaaggaatatttagtgactaaaatatgcctagttacccttatggcacagacacttgtctccccagaatgttttcagttcattcctcagagatttttttttcagcctaataagaggtgaattataacttattaacccaactgatgccaaacttccattttctttaagacgcatcaatcagctggacatactatctctcataacaaccaataccacaaagttttacaacacgatgttttgaatctgcattaaaaagagttcaattaaatttactcaaaatattctgtatacatatgtgtgtttatgtgtaattttcccttaaaacatcattaaagacaaagtacagtccacaagtttctt

SEQ ID NO: 663 - DNA, 264 bp, Homo Sapiens
ttttttttttttaaaactgagaagagacaactgattttatttagaagcatattctctgccctgtgtcctggtgtttacttttcttttttcctttcactttacttttgtacgcagccgtctctctattctccagccagtcaccccacccccaggcaacatgcagcagtactacttaacaatacctggtctaccagggattctaacctataacatagtatgcactagaaagccccagacacagccccacatccccaggacacagta

SEQ ID NO: 664 - DNA, 480 bp, Homo Sapiens
tggagagaaaaaagaggagtttattataattatactggggcaacctgtgtgagctcggactgccctaggcaaatccagacattgctgatccttatcccgaaccacccgcctacccctaaagtctaggagaccaagcttggctgcccttcagcatctcctccaggcgaggctgggcccttagctgtgcttcctcttccccaggggaggagcctctaccaaggccagaagtggaggaagttccgtggtcaaatgggtgtgggaaatggactattcaccctcttaccccttcttgcagattcacaatatatattgtgaattaaagatgttgagaagacctgcagtaaattaaactgctgagcattgtggagcctctggtttccccaaaggtgctggagcacgagggagatctttttctgctgaacgtctaggacatgcaggcaaaaactgctttaaacctttggaggcaaaagtccagaggca

SEQ ID NO: 665 - DNA, 443 bp, Homo Sapiens
gcttgaacaaatattttatttattcatgggtagaccataaggtttgataatacagttcttcctctgttagagatgaaggagtcaaggcatgatcagctgcaatgtcagcaacaaaaccaggaggagatagggctctctcctccttcaggacacggcacagcacagcacggcagtgttaagggtgtgtctccctttggggtttccaagttgctctgtatcttctcgtgctggggctgaatgttcttcagctgtacctccactaggagaacatcagctgtgaagacagagcctcaacagtgtgaccacaggacagatctttgttctctttgtcctcaggagatgaattttcttaagctctcatggagctctttggggactcccttttgttaggctgccttcaagcaaatgagagaatgtgggaaagcaagcaacctgcacaccat

SEQ ID NO: 666 - DNA, 427 bp, Homo Sapiens
  misc_feature (357)..(357): n is a, c, g, t or u
  misc_feature (387)..(387): n is a, c, g, t or u
gatggtgaaatatgttttaatattgaatacacccgtaacgttttctgtttgccttagctctgtaacgctgaaattaactttggctgtaggtttgttactgtaacctgggatcacttttctctttctcacattccgtgtgacagtgatgatgaatattgcattctttgggactgacagtcacagtaagtgcttcggctgtggctcttaggcttacccaaatcagtcctccttctgtctggagaggtggggttggaagtcagaagagtggaggtcaggaattcaggaaaagggaaagaagtcatttatttgcttcgttttgcctttttccagtgtaattgattttaagatagaactganagaatattcaacacacactctctctctttnttttttttccttaaacagaactttattttctcacagttct

SEQ ID NO: 667 - DNA, 333 bp, Homo Sapiens
ggaagaaaaaatgggttttaataagaaattaaggaggtggaaataacaataagtggacaagtgaatttcaggttccacattaaagcagacttcatgtttctatgcaggatcctctcactctaaatggaaataaaagtcactgaaaaaaatgacaaatgccctggggtatttggcaaaaggaatgatcttcttatctcagattatagttgaattcctaggaaatgtctttcttctttaacgttatagtttcctttatttcaccaggtgcacattaagatccacagatttgattctcaaacacatgactgtagccaattccttggtcgtactctc

SEQ ID NO: 668 - DNA, 338 bp, Homo Sapiens
tctgcttaatttgtaagaaaggtatagtaaaatctcattatttttactagatttatctaagtattcttgttctatgaatttttgtattatgtaatttgaaactatatatttacaattatttttcctgaacaaatgctttaaggagtattttgccttaacatctattttgcttggtaataatgtagctccttcggttttgttttggtcaatataggggccagcaaactttggcctatgggccaaatcctacttgcagcctgtatttgtaaataaagttttattggaacacagccatgcctgttctatttgagtaccgtcaatgactatgttcctgccac

SEQ ID NO: 669 - DNA, 397 bp, Homo Sapiens
tttcaaggataagaacatttaatattaacatgtagattacagaaagagatcaacatattttaaagcgtgttctgctgctttatcttgcttaacatatctcgatatttttggcagtcaagagtacatgtttaaactggaggtaattccatggtgggttatcactcttttcttgaaaggagcatgtgcatatttctcttatacataaggaattctgatatgtccagtttgataaaaatcaatctgcttaagagcccattacgctgctttgtcaccataatgttccaccgaaggaaatcttgtataatagaggactttgctcatcttgttcacttggtagttgttccttaaagacacaattaccttggtatagttctatgcaattattatctaaatagct

SEQ ID NO: 670 - DNA, 473 bp, Homo Sapiens
tctcctggtattcctcagttctttatttggtggttaaattatacatattgctttagagagcaggtaggtggccatgtgttcagcagtgtgtccttaagaaaataccatctttctaagccactggaatttttactttactatttttaacattaatggatgtcaggtcatcaacctcaagtctttacatatccatgtatattccatatatattgtttatataggcccaagtttctccttaattgggatctatatactaccagcacaacatcaaaaacatgtaattgaatacatcagagctatatatgtaaggaaatgactggtgaccccattatcatcattgttgaattcatgttaagtagaccctctaggggaccataaggcaattgagcacataacgaaaaatgatgcaataagaatgtatgcactctctttgccaaatgcatgtgcttttgtgtaacggtgatgtaaacaga

SEQ ID NO: 671 - DNA, 418 bp, Homo Sapiens
gaactgatttattttactcaggtaaataaaagataatgactgaaagactgcattccttagaacaaaacaaaaccaatgaaacgaaaccctcttatattttgtggttctttacgtcacaattctatattacactggtgtcaagaaaccagcagacagatgccagtagacaaatggtttcattgttatcccaaggccatgcacgccttaataaactttcttagacttttaactcttaattaatcaggtgctattctaaattagggcatttcaagggtttttactgtatcagaagaatatgaacatttatttttgctttcaaagaaaaagcaaaccctaaattctcctctccattcttaaaattcactaacacaacctgtcagaaatagactacacacctgaagtacagaagacacatagc

SEQ ID NO: 672 - DNA, 342 bp, Homo Sapiens
  misc_feature (276)..(276): n is a, c, g, t or u
tttttttttttttttttttttttttttggttctttctttttaatcctgacttttaaaacaggttattattcaaagaacaaaaacaaaaaaccagaccttaagattaatccaggagataaagcctgaactgaaaattaatgtcagctgggtgatcttgggcaagttgcttaacctctttgtgtaagaggcaccatgactgcaacttcattctcccctccatgtggggcttctctgtcttcagcatcctgtgaaagggctcaattctgcaatattttnagggtttcattaaaaggtattttattggggctgccttaaagacagcctttgaacaagtgaaaattc

SEQ ID NO: 673 - DNA, 417 bp, Homo Sapiens
ttttttttttgtgacctcaacagcatttattatctcactgcctctgtaggtcaggaatctgggcacaatttcgctgagtcctctggttcagggtccttcacaggcagcaatcaagttgtcagccagggctacagtcatctcaaggatccactgcagaaagatccacttccagcttcacttgggcaactgtcagcaggattcagtttttttcaggatattgtatcctgggcctcagctcttgtctgttcagggggcttctcattttcttgccatgtggggctctccaccggagagctcacaacagggcagcttgctcctgctttgcaaaagatctataacttccccattgatataatgctcagaataccttcttgctataccatcagcattccttgagtagaggccaagcaaactatc

SEQ ID NO: 674 - DNA, 495 bp, Homo Sapiens
tcatggtttacagcactttattagcacagccttagcaaacaaatacagttgatttctgctacttaccactgaggatcatggctggtattattttgtactgagtaaataattatgagacaacccagaacttggcaaatctgacagctcaggcagagatgggtgtctttaaatgacaggtcggcatggtcttcaaattctcacaaaagtagtcctgccttgcaggcctgtcgagcagtctttggtagcattcaagtcctcctcccaaggcaagttggagtggttcgatgctcagtaggttccttaggtgggtgggagaatccctgcccttgagcctgcagcctcttcctggccactcccttttcctggtggctgaggtgtttggaactctctgtccaccacaactagctcaagatgtcttgggctgtggtcttcaaagtggttaaaaagacactgcgcctcctccctgatgaggatctgcctcacagtcatatggct

SEQ ID NO: 675 - DNA, 461 bp, Homo Sapiens
ttttttttaaacctagtcctaaattttaatctatatacatttctatctgcctcctttttgcatgtcaccagcaaacaatgtataatcttttaaaagtgctaaaaggattttttttacacatctgtattcttacagatatataatttgtgatgtcatgacacataaaaatcacaattttcatgtaatttagaggccctcccaaaaatcccttctaaatgtattttaccaaaatctcatacaagtgtttaattaatcccttgatttgaaacttcttttggataacgtttttggaactactcaaatgttaaagagcatacaccttcttcagttcttaacatggacaaagacctactgtttttcatctccagcagtgcattttttttttgtcaagaaatttattaacctttataaacactattttcactcaatcattcataaaaaatgatttgtgattaaatctg

SEQ ID NO: 676 - DNA, 425 bp, Homo Sapiens
tttcattcatcagacattttaatgagacccaatctgatatgaccccttcttgggggtagctcatcatccaaggagaaacaaacagttacaatgttacaatgcaacttgctaaatattgaacagaggtaattacataaagctgtgttcccccagctgctcccctgcttgtgctgagatcaggagagctgtaggaaggagccacaggggtaaaggatgacccactccagctgttggaatatgagatgagtcacatctggaaattctaatttggtgcagctgcccaaggcaaagtggtagcccttgttcacatttaactcggtaaagctttatgaagcacctacccagtgggtgccatggaggtggatcagattgagccacgctgctgccacctctgtggagggaggctggcatggatacaacttgat

SEQ ID NO: 677 - DNA, 539 bp, Homo Sapiens
  misc_feature (319)..(319): n is a, c, g, t or u
  misc_feature (335)..(335): n is a, c, g, t or u
  misc_feature (441)..(441): n is a, c, g, t or u
  misc_feature (513)..(513): n is a, c, g, t or u
  misc_feature (522)..(522): n is a, c, g, t or u
ttaacacatcaatagctttttatttaaatagaaaaatcaaaactttaaagttatactttagaaataattcatggaagtaattaatgttttctacagattctaagattcttttgtgaaacatcagtagtatatatttgccagcatcaaatgcatactttaaagatttgccactgacttccatgtcaagtgattgacatgattagcaatattaactcactacaatgggacctctgaaaattgagtctagacaactccctgttgccaaagttattatgtgttttggctctaatatacaataggagactaatctcaagcaatntgattacttcacattntcttcaagaatgagtcttcttacagcctggtcatatttcacagcagaaaattgcttggggagacaaatgagaaacaatcccctcaccaccctcagctttaaagagngacattatattttattcaacgggcaatggggaagagcattctgggcagcccactttcaactctaatgggggnagaaaactnttttgttttcaatccca

SEQ ID NO: 678 - DNA, 475 bp, Homo Sapiens
ttttcatttcagcttaattttatttcctcttataaatgggcacagcacaggaagtgttaaaaaacaaacaaacaaacaaaaaaaaacaaaaacaaaaacaaaaacaaaaccagttccttcacaaggctggaacaggagagtacccgcagtggggcaggcgccttggtctcttttttccactgtctttttcttttgtttttcttatttaaggttttggccatgaactcaggacaggtatggttaataaacaggttacaggggagagaaggggcagggaaggcctgggggagggaatggcagacccccacccaccccaggcaggttctgtacaggagaaaggactcacaggagggagggacactgtcttcagggggctctctggagccacgctgcctacgaaaaatatttacatgcatttgccacgctgaggccagggtcactgtggtgccaggcaggcacctgggggatgctgggg

SEQ ID NO: 679 - DNA, 391 bp, Homo Sapiens
  misc_feature (22)..(22): n is a, c, g, t or u
  misc_feature (298)..(298): n is a, c, g, t or u
  misc_feature (316)..(316): n is a, c, g, t or u
  misc_feature (332)..(332): n is a, c, g, t or u
  misc_feature (381)..(381): n is a, c, g, t or u
  misc_feature (387)..(387): n is a, c, g, t or u
aggaactgattaaaagaaaagnaaagtagtgaaatacatatttaataaatcatcagtcaaaatacttaaaattcatggaaatatattcactgataaagaaattatacttttagtttaacattcacttgtcagtatgtgtcaaggtccactctgtatagaatcaagtcactaacttcttctattcttttctttgttcctttattccttccaacatccatctggctatttgttaagcaccttgctaggtgctggggacttaatggaaagccagacagatctagtttttgcatttatggantttggggatgttaaacangcaattacacaaagtntgtgaagcctatatgcatttgatttttgtttattaaacctccaagcatnatgggnaaat

SEQ ID NO: 680 - DNA, 495 bp, Homo Sapiens
  misc_feature (266)..(266): n is a, c, g, t or u
  misc_feature (322)..(322): n is a, c, g, t or u
  misc_feature (330)..(330): n is a, c, g, t or u
  misc_feature (335)..(335): n is a, c, g, t or u
  misc_feature (427)..(427): n is a, c, g, t or u
  misc_feature (437)..(437): n is a, c, g, t or u
  misc_feature (442)..(442): n is a, c, g, t or u
  misc_feature (461)..(461): n is a, c, g, t or u
  misc_feature (474)..(474): n is a, c, g, t or u
  misc_feature (493)..(493): n is a, c, g, t or u
ttttttttttttttggttttaatctattatttacatatttgtaaactgctgttaaaatgctctcaaaaatgttatttaggaaggcacaatttggtagcatcaattttttatttatagttttttctaaacaagatccgaagaaacttccactttaattttccccttggagtacttaaagtacttcaaggttcaatgtcaaatgcagataaaaccccttcattttcaaacttactaagtgttaacaatacatttgatagtgagcagantatgaaagtacagatgttatcaaaagaggaaattcttatgatactaggttcagagnttaaagantttgnaacaaggggctttcatgactggggggaaaatccaaagcttttcttggaaggggagtggggcttttaatactcggggctattaattaaatgcnggaattgagntaacntagttatcccggaccttcnaaaaggcaccgcntaatacagctattgctttnta

SEQ ID NO: 681 - DNA, 430 bp, Homo Sapiens
  misc_feature (345)..(345): n is a, c, g, t or u
  misc_feature (386)..(386): n is a, c, g, t or u
  misc_feature (428)..(428): n is a, c, g, t or u
ttttttttttttttccatagtaataattttaataaaaagcaaaaacagcaaaacaatcatttataaatgatttcgtctctgttggagaagttaacactgttattgctgtataaaccacttggaaatgagctattctggtgcctagttaagatgtattcttttcagcatattttcattttgccagttaggcagggaaaagctacagtccactttcctggggggaatttagctgaactactgcccacaggtgacagtgaactttacaaatcactccaataagtttagtaggcaaagtaaacatctttctcaagtgttgaaatcacagaagttaggacaggacaagcnggggaggcaggtcttttagggggtttaaactttcatggccnctttgtggcacatttacactagggggcactttgctttcttgngg

SEQ ID NO: 682 - DNA, 537 bp, Homo Sapiens
  misc_feature (67)..(67): n is a, c, g, t or u
  misc_feature (410)..(410): n is a, c, g, t or u
  misc_feature (440)..(440): n is a, c, g, t or u
  misc_feature (481)..(481): n is a, c, g, t or u
  misc_feature (489)..(489): n is a, c, g, t or u
  misc_feature (498)..(498): n is a, c, g, t or u
ttttttttttttttttttaagttttcaccacactcatttaatttggaaactgaggcagagaccaggngtccaaggtcactcaagttatcaagggtggtgctagggctggaaactgagctctgtgactctgggtgccagggttttgtcagcatttccttgagactgatcttgggtggcagacacagaatcaatcatgagagtattttgtagtcaaacagcgagcagatatgcatcagcaatccctgtcttgatccatcccttttctttatacgatgatccagggaggaactgtctgtcttccatcgtgtctgttttcagacggattttgaccttgcagctaagtctttctctcactgctgactctgctcactctccttcaacttgattcatttggggcccattgggttccngcttggggaaaggcccatctggggagtggntcagtacattcccctgttcaagcagggggaaagagctgcanttgcaaantgagggaanttccaagagggttttgggccagaagtcaatttgcaattt

SEQ ID NO: 683 - DNA, 418 bp, Homo Sapiens
  misc_feature (147)..(147): n is a, c, g, t or u
  misc_feature (229)..(229): n is a, c, g, t or u
  misc_feature (235)..(235): n is a, c, g, t or u
  misc_feature (244)..(244): n is a, c, g, t or u
  misc_feature (286)..(286): n is a, c, g, t or u
  misc_feature (294)..(294): n is a, c, g, t or u
  misc_feature (367)..(367): n is a, c, g, t or u
  misc_feature (382)..(382): n is a, c, g, t or u
tttttttttttttttttttaatgcaaataattttattatatatttacaagtaatctgacattgggtagaagaaatacctacaatatcattttaatataaaatgacaaatgactttaataaattaaaatgaccatttttactgaaaanttaaatagcaatcatgtaaaaatagttttaaattatcagtaaatttttcagtataccagtttaaatatagcacaaatgggtnccttgngtgtccaangaaataatggacaaagcatatgtgttatcaagtagatatganctggtggnccgtgagaatgagattcagtaaatttagaaagcaagctgagtggttggtttcaggtccttttagttataggtntgaaggaagagaatnctgagaatgtgacattaattggtgataaatggtggt

SEQ ID NO: 684 - DNA, 588 bp, Homo Sapiens
  misc_feature (381)..(381): n is a, c, g, t or u
  misc_feature (467)..(467): n is a, c, g, t or u
  misc_feature (513)..(513): n is a, c, g, t or u
  misc_feature (523)..(523): n is a, c, g, t or u
  misc_feature (565)..(565): n is a, c, g, t or u
  misc_feature (578)..(578): n is a, c, g, t or u
ttttttttttttatttaacagtagctttaatgaattaatgcacaatattttgaaaaatctttgaccttgctcataagcagatgcctgccttgaagaaacactccaagtctgccgtgattccgagcgaaatgccaaggcagagtcaagacaatcattacctttagggctgaaacctgggcatgaggctgccccttctgggatgcctcctaaccagtctgatgtactggggaaggaggagtgaggtggggtcttcctcgggtcccagaagctgaaaacccagcccttcctttgccatcagttctgtgccaaggctggaagatgctgctgggagtgcagggcttcccccgtgtgggcgctgcagcttcacacaggagcttggtnggaggaatgaaggatgggattctggggggtagccggaggggtagggggctcactggggagccacagaacatggctggacctccctntgaggagccagatggtttcgcagccccttttgggactttaagcacntggagcaggnaaggccaagctgggaaccccaagaatttggtcctaagggttngcaaattttaccntccagaccca

SEQ ID NO: 685 - DNA, 502 bp, Homo Sapiens
  misc_feature (52)..(52): n is a, c, g, t or u
  misc_feature (57)..(57): n is a, c, g, t or u
  misc_feature (60)..(101): n is a, c, g, t or u
  misc_feature (108)..(108): n is a, c, g, t or u
  misc_feature (447)..(447): n is a, c, g, t or u
  misc_feature (475)..(475): n is a, c, g, t or u
ttttttttttttcaaatctcaatcttgtaaatgtttacttctggacaatttnatcanttnnnnnnnnnnnnnnnnnnnnnnnnnnnnnnnnnnnnnnnnnntttttantatgtcacagcctcttcaagcaaatcaagaataccaagactcactcagatatgaagttagtttttggatcactggcttcttcagagagactcagaagatgccttattatttttgtgatttatttctgggcttctcacatatccctgtcatacagccaaacgtgagctgatgctgacaatagtttattggccatggagaaaatcctcagtcttgatgggaactccgggatgataccaaatgaacagcgagggaacatcagggatgccaaaaaggtccttatttacagggggaaagggagggctaggctgcttatgtgttcaatggaggtaataggtgccncttaaagtattgaaataatactgctagngttttgcctatttgggcatacagtgta

SEQ ID NO: 686 - DNA, 406 bp, Homo Sapiens
  misc_feature (198)..(198): n is a, c, g, t or u
  misc_feature (212)..(212): n is a, c, g, t or u
  misc_feature (402)..(402): n is a, c, g, t or u
aaaggttttcaaaaatggatttattatgaggtacaagtggcaatgaagtagcaatgaaataaatattcaaaattaggttatgacatgagatgtgtcggtttcgatgttcctggggctgcagttaccaaactgccagcttataatggttgggtaggaaggaaatttatcatctaactaaacaagaagtgcggaggcggnctgactgcatcgcnggtcaagcttcaccctcagggctgggcaatcagagctccccagctgcaagctttctttttcagacaagggcgatgtccagaaggcaaagggagcatctcttgctctgcttctttcttagggcttgaggggaattttttcccagaggctaccagcagtcttccctttttcagtgtttaatcatcagggttngggg

SEQ ID NO: 687 - DNA, 437 bp, Homo Sapiens
  misc_feature (300)..(300): n is a, c, g, t or u
  misc_feature (340)..(340): n is a, c, g, t or u
  misc_feature (363)..(363): n is a, c, g, t or u
  misc_feature (426)..(426): n is a, c, g, t or u
  misc_feature (434)..(434): n is a, c, g, t or u
ttttttttttttttttatttgtaacaaggaaacaaatttattgattttaaaagacaagacaccattttgttttgaaaaacacaagaaagctagcctgagttcaagtctgaaatattcagaaaaatcctactaatatctttagtatgttccagtcatttgtttaaacaacacactaaaagttaatatatatttttataattataaaagttccccagttattgtacagtacacaatacaaatcgcccacaaactattatttaggctcctgccaattttgagaggacatgatatactaaaagntttaggcatttctcacaaaaatcacatcagggaaatacgnatttacaaaatccaaatacattnttacaaaagaccatcacatgttattcggtaaagttgtttttgaaatagtttaaaagttttttncaaccgtngtc

SEQ ID NO: 688 - DNA, 379 bp, Homo Sapiens
  misc_feature (4)..(5): n is a, c, g, t or u
  misc_feature (13)..(14): n is a, c, g, t or u
  misc_feature (21)..(21): n is a, c, g, t or u
  misc_feature (46)..(46): n is a, c, g, t or u
  misc_feature (63)..(63): n is a, c, g, t or u
  misc_feature (272)..(272): n is a, c, g, t or u
  misc_feature (331)..(331): n is a, c, g, t or u
  misc_feature (344)..(344): n is a, c, g, t or u
  misc_feature (373)..(373): n is a, c, g, t or u
tttnnaactgtcnnaaacctntggagtcaggagaaagaaccctggnagaggagaagacctggnttctctagctgggtgacctttgtaactgtcattcatttagcaagtattttctgagtgtccaccctgtgctagcatcgtggtaggtgacagggacatgatgatgaagacacatgatccctacactcatggagtttgctcttcagcctagagtgtaagtcatttaatccctctgaactcctgattcttcatttctaaaatggaaataaaangactacttacttcacaggattgctatgagaattaagtaagataaatatgtacaaatccncagtaaatacccnaacattaaggcatttttattattaagggnttattt

SEQ ID NO: 689 - DNA, 396 bp, Homo Sapiens
  misc_feature (113)..(113): n is a, c, g, t or u
caggaacttctctgcctcggctccggttgccgaagagaaaggggatcgcgcgtggtggggaggagaagggcgagagggggcgccaccggggaaggggcggctgcggggggcangtcgggggcgcaggggtctagttcccagctttgtacctggaggcaggttcacccctcgcctctctcccctcccccaggctcatcccacttgtaagagtgggacattcttgtgctcacactagcaccagtagaggccactacacacctcattaaataaacaatcagacggccaattcattaattttcaggaaaggggagggggcttgagctcctgggttccctgggccagggatttcccagcttccgaagtcttcgaggaagagctggctagtcttcgagggac

SEQ ID NO: 690 - DNA, 259 bp, Homo Sapiens
  misc_feature (120)..(120): n is a, c, g, t or u
  misc_feature (159)..(159): n is a, c, g, t or u
ttcaggaattttaaatttctaaaacaaaaacaaatcaatatttaattccagactcaaattgcttaatatgtggataaaaaccttttgatctttataagtttatatatatagtaaaatttnccctttacaatgtctaaatttgcctctacataataaaanttgtctcacaatgatatctactttaatttgatactttactaactttgttttgggaaaaaaatcccaacttaatatgattataggatttttaaaatatttg

SEQ ID NO: 691 - DNA, 425 bp, Homo Sapiens
  misc_feature (6)..(6): n is a, c, g, t or u
  misc_feature (38)..(38): n is a, c, g, t or u
  misc_feature (51)..(51): n is a, c, g, t or u
  misc_feature (81)..(81): n is a, c, g, t or u
  misc_feature (196)..(196): n is a, c, g, t or u
  misc_feature (229)..(229): n is a, c, g, t or u
  misc_feature (269)..(269): n is a, c, g, t or u
  misc_feature (317)..(317): n is a, c, g, t or u
  misc_feature (417)..(417): n is a, c, g, t or u
tgaggncccttttacaataatcttgattctattttgangcgagtttctgangtgccataactacaaaccaaataaagagancataaaagcactaaagcttttattgctattatcatcaaattttaaaaacataaaggtacaagtaacttcacaatcacttcacaagagaaaagaggttcaatcattttagcatggnattcaaaccatcaattcacaattagtaattatncttatgaagggaataatctcaagtattcgtccagttattnccttatttaactcagtgcaacattttctccatgaggggatccttgggnacatgggaattaattgggcaaataggataggtcatacctttaagggaataaaaagggttcccacccctttacaggaaagccaaacggacttacccagganccggggat

SEQ ID NO: 692 - DNA, 493 bp, Homo Sapiens
  misc_feature (384)..(384): n is a, c, g, t or u
  misc_feature (418)..(418): n is a, c, g, t or u
  misc_feature (424)..(424): n is a, c, g, t or u
  misc_feature (455)..(455): n is a, c, g, t or u
  misc_feature (489)..(489): n is a, c, g, t or u
gaaaagtaatcaactttggaccttgtaaattaagtatgttcctggaaaccccatagttgagcttactagggaataattctgaactatccctaactggactgcaaaggccaatcactcacacagttcatctcttgcacagctgggtgggagctatccagggtagtagagctccaagcaagggcagtcatattcggggccagttgggctagtttcccttgattagaattcaaggtgttcttattcaaagggcatcatcacctccctgccctaactctccacacttgtccccaatgcatctgggtaggagcccacttccttgcccagtttctaggtcaatacctggccaaagcgggttaacaaagagtcccgacgggaaaagggagnccgattcataccccccgacgggaaaatttggggncacagncaaggggccagagtttcgtggaggcaggcanctcagaggggaggggggattttgcctttgtcccnttaa

SEQ ID NO: 693 - DNA, 304 bp, Homo Sapiens
  misc_feature (34)..(34): n is a, c, g, t or u
  misc_feature (67)..(67): n is a, c, g, t or u
  misc_feature (164)..(164): n is a, c, g, t or u
  misc_feature (231)..(231): n is a, c, g, t or u
  misc_feature (268)..(268): n is a, c, g, t or u
  misc_feature (280)..(280): n is a, c, g, t or u
agagtcttgctttttaatcacaaaacaaatcctntcctttccaagtaatatcctctcaaggccaggnattctgtaagtagatagccttcttaaaaaacattcctggcgggacaaggtggttcatgcctgtaatcccagcattttgggaggctgaagcgggaggntcacctgaggtcaggagttcaagacccacctgggccaacatgggtgaaaccccaactctactaaaantacaaaatttagggagggtatgggtgggtgggtgccnggtaatcacagntactcagggagggctgagctaggg

SEQ ID NO: 694 - DNA, 407 bp, Homo Sapiens
  misc_feature (341)..(341): n is a, c, g, t or u
  misc_feature (346)..(346): n is a, c, g, t or u
  misc_feature (354)..(354): n is a, c, g, t or u
  misc_feature (397)..(397): n is a, c, g, t or u
  misc_feature (402)..(402): n is a, c, g, t or u
agggataacctgtcatctacatttgaaaattaatgaacaattctcgttacatagataatatttttcagtgacagtcgtatttttttctgtgggagggtgcacatttatattcatgaaattttagtttccagctttgaactggcacccttgttaaaaattctgatttttttttttttttaaactctggggattttacttaacaggttctgaaaggcttggaggctataacattctcacattgggaaattccttactagggaattacttaggtttgaacttaggaatgatggatggaacttttggggacttaaatatactataacttttgtcactagggatcngggantattcggnggtgtggaggtcaggtgagtgggtgttaatcaaggggtctggnaaggncctgg

SEQ ID NO: 695 - DNA, 433 bp, Homo Sapiens
  misc_feature (1)..(1): n is a, c, g, t or u
  misc_feature (414)..(414): n is a, c, g, t or u
nagctggggaatactttcatttgatcagcagcagaccaccctaataattcatcggtgtgggggaatttaggcttagaggggagtgctgtgacattgtcatctccagatccacataacagagttcaaagaaaactgtcacagagtttagaagtgggtgcttcaagaagaggaggctgtatctcactctctctctggatgctggctgagctcagaagcatggcagccactctagctctgccacagggagtggaggcagagaattcctgaaggacttgaccccttgacactggagcttagagtgatcccagaaaacactttaacttgcagactcatttcccaacaagggtagtctttgttccaaataggaagtcttcatttgctttaggataatgtaggaccatcaaattgtgtggnttcttaattttacaggatt

SEQ ID NO: 696 - DNA, 469 bp, Homo Sapiens
  misc_feature (257)..(257): n is a, c, g, t or u
  misc_feature (353)..(353): n is a, c, g, t or u
  misc_feature (383)..(383): n is a, c, g, t or u
  misc_feature (412)..(412): n is a, c, g, t or u
  misc_feature (447)..(447): n is a, c, g, t or u
  misc_feature (456)..(456): n is a, c, g, t or u
agagatgaagtctcgctatgttgcctgggctgaatctcaaactcctgggctcaaatgatccttctgtctgagcctcccttagtgctgggattacaggcatgagcctttttaaggctagtcaagtgaagaagtgggaatggagatggaacaaagaaatccgtgactggttgtgatccattagttgtaacaccactgcacccgggaccagcttagctgcaacgttcttgtaagtattatttccacaggttccaacaggntccttcaagtaggggtgtctgggcagccttaaggagtcaaaaagagggtaacacagtgggtagtttgaataagggtgacaccacaggaagggtccnaatgtttaatgtttaagggggatctctttnaaattctactgttttacaaaggtgggttnaatttattgtgttaaggtttcaagtttaaggtttnaggcccggnccttggtttttaa

SEQ ID NO: 697 - DNA, 303 bp, Homo Sapiens
  misc_feature (285)..(285): n is a, c, g, t or u
aatttaaagatgggggtcttggtaggttgcccaggctgaatttgagctcctggggtcaagcaatctttccacttcagcctcctgagtagctgggactataggagtacaagtggacaccactgcaccaggctgaaaggtgtttttgtgtgtgtgtgtgtttttaactcagagagtatctgccacccttccaatgggtttgatgtgaaattcaaccatttcataatctacctactggggaatctaagagaatccattaggggactctttattagcttgtgattttcngtaggatataaatttccc

SEQ ID NO: 698 - DNA, 398 bp, Homo Sapiens
  misc_feature (299)..(299): n is a, c, g, t or u
  misc_feature (363)..(363): n is a, c, g, t or u
  misc_feature (392)..(392): n is a, c, g, t or u
ctaagggacagagtctgttgccctggctggagtgcagtggtgcctctagctcactgcagcctaggattcctgggctcaagcagtcctcccacctcaacctcctaagtagctgggactgtaggtgcacaccaccatgtccagctacaacaattaataactgagtagctactgtgggcccagtcctcccattgataacatgtgtaaactgtggacaaaaatacaagaactacctgaagacactagagagtaaccaaagggcaggtggagaccagagaggtgggggctggcatttggaagangagaattgcactggggaaatttcttatttctgatggctgttagcctgttggtcacttcccagtnttttccatggtgggcagttaaagttggantaggca

SEQ ID NO: 699 - DNA, 447 bp, Homo Sapiens
  misc_feature (1)..(1): n is a, c, g, t or u
  misc_feature (3)..(3): n is a, c, g, t or u
  misc_feature (6)..(6): n is a, c, g, t or u
  misc_feature (8)..(8): n is a, c, g, t or u
  misc_feature (191)..(191): n is a, c, g, t or u
  misc_feature (442)..(442): n is a, c, g, t or u
nanatntntttatttttcacaaactcattctcatttcctagaatgatacctcaggtataaatacctaaaaaggtgtgttctttattctctctcacatacaaaagaagtgcaaaataaccccagtattaaagatgctactatggttacatgttatggattaaactgtattcccctaaaattcatatactgangccctaatctcatgtgatagtacttggagatggaggcctctgggaggtaatcaaggttggatgagatcataagggaggggcccgggtccagttggactgggtgttcttatacaagagggagagacacagaggcacctgctcttccctctccctctggctcctcctacatttcccctcctatggggctgagggaaagggctgtgtgaggacacgcagggaaaggcagtctgcagggccgggggtagggcttncacca

SEQ ID NO: 700 - DNA, 434 bp, Homo Sapiens
  misc_feature (368)..(368): n is a, c, g, t or u
  misc_feature (385)..(385): n is a, c, g, t or u
  misc_feature (418)..(418): n is a, c, g, t or u
aaaagacgaggtctcactatgttgactagccagttttgaaatcctagcctcaagtgatactgctgccttggcctcccaaagtgctggaattacaggcataagccactgcacccatcagggagcattcaaatgagattgggattgagatactgtcagtgaatttggccattaggttatttgtaaccttggcaaaaactaattcagcaagatgacaaagttagaaaaaaagataatggtagggtacggaggttctagagaatgaagccacaaaagatagagaaagcagattatttggctctgacaaggattatgggttaaagggaaggggaaatgacacaacaatacctagtgggcaaatggcaagatcntaaggggagagggttgnttttaataaagggggaggccaagggaatgaatnatcgggaatgccaaag

SEQ ID NO: 701 - DNA, 202 bp, Homo Sapiens
  misc_feature (138)..(138): n is a, c, g, t or u
  misc_feature (167)..(167): n is a, c, g, t or u
  misc_feature (176)..(176): n is a, c, g, t or u
  misc_feature (200)..(200): n is a, c, g, t or u
aatgacagagagctggaactgagttgccctatgcccagagatgaacaggtacaatatgtgactgtacaccacagaggactgcgttactcgctagttagacatcatgcggcgacatagcccttagtggaaaaatagtangacacagctatacaactcaaaacacaccntttacatantgcataaaaatgtacaatgtttangt

SEQ ID NO: 702 - DNA, 252 bp, Homo Sapiens
  misc_feature (76)..(76): n is a, c, g, t or u
  misc_feature (245)..(245): n is a, c, g, t or u
tacttttcaggtttaaatttatcttttttcttctaaaagtatgtttttatcttctaatttccctatcttctctatncttttcttcgccttcccgtacttctgtcttccagttttccacttcaaacttctatcttctccaaattgtttcatcctaccactcccaattaatctttccattttcgtctgcgtttagtaaatgcgttaactaggctttaaatgacgcaattctccctgcgtcatggganttcaagg

SEQ ID NO: 703 - DNA, 265 bp, Homo Sapiens
  misc_feature (104)..(104): n is a, c, g, t or u
  misc_feature (122)..(122): n is a, c, g, t or u
  misc_feature (172)..(172): n is a, c, g, t or u
  misc_feature (190)..(192): n is a, c, g, t or u
  misc_feature (221)..(221): n is a, c, g, t or u
  misc_feature (233)..(233): n is a, c, g, t or u
  misc_feature (241)..(241): n is a, c, g, t or u
agttgctccctaaaaaagaaccctggaactagttacaatgataaacagacaaagaaaaatacacattcatatttatagttacatatgtcatggctaaaaataanttattctaaattgtatanaaccataagatatacagtgataactcaatagtatgttgtattagtctgtnctcacactgctatgaagnnnttctcgagactgggtaatttataaagganagaggtttagtngactcagngttctgcattgctagggagacctg

SEQ ID NO: 704 - DNA, 294 bp, Homo Sapiens
gtgtgaatttaaacagctaaatagggatcagtaactttatctctatccttaatgaacatttgttttattggtggctggaaatatttctattgtatttctgtgtatatttttaataaaattatttttggcctcttataaagacaaatcttattaaatttgaaacatttcatatatacacataaaacgcttttaaagaaaatttgtgagttgtatattccaattcaaaatgccatctacattccccttatgtttcagtgtgagcaatgaagaggtcttttgatgaattaaatttca

SEQ ID NO: 705 - DNA, 438 bp, Homo Sapiens
ctgacttaaaaatgcttttaatgctactgatatttaatcagtacctatcagatgactgctctcatatttcaaatctggaattacaaattgaagacattcagaaaagagaacttgtcccttctctttagagaattattgaaaagtacagataagtttgacaaaattacaattcatctatctttagacattttagtctcagccatgcctaatatgcccccccaatataaaattactaatcaagacacatggtcccgcagttctagatgtttggtacagtaccattatttgcctaatggtaaaagaagttgtgcttctagaacacgtgaaaaatgaagtgtttctttttggtaaggcattccaaggatatcctgtctagtttcttggaaatttccgtgcctaattagaaaactaaaaataactcacttttattacagatgg

SEQ ID NO: 706 - DNA, 547 bp, Homo Sapiens
  misc_feature (1)..(1): n is a, c, g, t or u
  misc_feature (3)..(3): n is a, c, g, t or u
  misc_feature (24)..(24): n is a, c, g, t or u
  misc_feature (379)..(379): n is a, c, g, t or u
  misc_feature (396)..(396): n is a, c, g, t or u
  misc_feature (425)..(425): n is a, c, g, t or u
  misc_feature (459)..(459): n is a, c, g, t or u
  misc_feature (509)..(509): n is a, c, g, t or u
  misc_feature (530)..(530): n is a, c, g, t or u
ntnaaaaaaaagtgtttatttccnttattttaagattcagtaggatagccaaattcatagagaataaaattacatgaaagagttacaagctcactgttttaaagacttgacatttttcatttagttttaattaacagtaataagtcacctcctgtttttcaatgttcaccaaaaaaagaaacatagaatagggggaaaacatgcttatatagccaaggtacagatccagatgatgtaacctttttagtattcgcatgacttgaaaactgggcagatcaatagataatcgaagtgctttatctgaagggagagggtaaagacagtgtgaccaggtttgttttcagggctgccgaatgagcctcaccttaacagtgtccangggtaattcgctaaccntaacaaagatgggaagaagtgagtgctcngatgtcttctgctgggctctccataagtactggnaatttttttttataaataaaaactgggaatatatatgtacagttgtaagnatttcccccttttaattttgnaatccagagcctgattg

SEQ ID NO: 707 - DNA, 621 bp, Homo Sapiens
  misc_feature (520)..(520): n is a, c, g, t or u
  misc_feature (564)..(564): n is a, c, g, t or u
gaacagactaaatttgttttaacaatcccatttacaattcaaattcctttaaacaacttaatagcatttatacatttaaaaaaatgattcttttaagcagcattgcaaatgcttgaccccattagcataaaccttcccaagtgcttaactctcataaacataataaattaaacatatggtgactttccaagttctctgaaacatttcagtacttttgcagacttagtaacattttaaaatacctttcaactgaaactcataagtctaaaagtctgttaagcattttaaattagaatcttaaggccagtgtcacatattgtaatatgccaattatgtttaaatacttcaaacagcaaatactacagtttatctcaatgaatataataaccattcctgctgggcgcagtggctcatgcctttaatcccagtcattaaggaggctgaggtgggaagattgcttgaaaccaggagattgcctcaggcctgggcaacatggtgagacctcctatctcaaaaatcnaaataaaaattagctgggcaggtggctcatcctgtagcccagcntctcaggaggctgaggtgggaggatagcctcgcctaggagacggagctgcagtgagc

SEQ ID NO: 708 - DNA, 459 bp, Homo Sapiens
  misc_feature (208)..(208): n is a, c, g, t or u
  misc_feature (391)..(391): n is a, c, g, t or u
  misc_feature (393)..(393): n is a, c, g, t or u
ttttctcccagacaattttattgatattaataatataaacttcagggaaattgatatatgagagaaatggaataaattcaatatggtctgttcctttttctattgtgtcgtagttgaggttttgaggagtatttgcttctggccaaggctggtgttcgagattcctgagcagccctccaccatctgttgtgtgtcagcctgtgccagntggggatgggacagtgaggaaccggctgctactctgggagttgtccctggaggtggatacacgtgcatgcatttcacaagcagactgtgcctgaagccacagtgaggacgggagctgcagtgcatgtggcctgcacgtgggtgaggccactcatgctgtcttctgtctttcatcccaaagctntnacggaggaggagctgtcccgtgcactgagtgagggagaggagatcactgcggccccagagagagaa

SEQ ID NO: 709 - DNA, 454 bp, Homo Sapiens
  misc_feature (12)..(12): n is a, c, g, t or u
aaaagcgtatgnctaaatagctccaaaaacgatctggtaattagaaaaaagataatgcaaacttcaattgttttcccatttctgtacagcaagcacagatctgctgatagaagctttttttcattttgactgtgtgtgtttatgcaggatggacaagaattataaacagtcgcctaaactgtgaggagacaagcaagttggagaggagcccacaaactaaagaacagaatcttgaaagccaatgaagaaatacataattccacattatgatcatttggcatgccatcacactgtaatagtgtggtcataaaaaattgttatgtggatttaatttccaattcatttggaaaaggtactttgatttactttgttccattaaatatttatccaactgtagctaaattagtatgaaatgtataaactgtattagtataattgttttagttttaaatgt

SEQ ID NO: 710 - DNA, 393 bp, Homo Sapiens
  misc_feature (294)..(294): n is a, c, g, t or u
  misc_feature (311)..(311): n is a, c, g, t or u
  misc_feature (371)..(371): n is a, c, g, t or u
  misc_feature (381)..(381): n is a, c, g, t or u
gatgtttattagctttattcataattgccaaagcttggaagtaaccaagatgtgtccttcagcatataaactgataagtaaaagaacaaacaaacaaagaatctgtggtacatgcagacaatagaatatcattcagtacaagaaagaaatgagttactaagccatgaaaagacatggaagaaacttaaatgcatattactatctgaacggagccaatatgaaaaggttacatgctgtgtgatttcaactagatgacattctggaaaagacaaaattatggaaacagtgaaaagntcagtggttgccagggntgaggggtggatgtgaaggggtggagcatagatgatttccggggacagtaaaactactcngtataatacngtaatggtggat

SEQ ID NO: 711 - DNA, 461 bp, Homo Sapiens
  misc_feature (22)..(22): n is a, c, g, t or u
  misc_feature (25)..(25): n is a, c, g, t or u
gtattttgatcacttaacgaangcnctaccacagagaaagcaatcaataaatattggttactaagtgaattcatactgtatatgggacaaacactggtcttaaagcatggcacacagttcaaaataggttctgcagaaagcatacatcccaatacttacaacagcaaaaacattgagctcttaattattcatgcttacataggaagacaattatagattttaaaaaatcatggacaatataaaaatcctttatatttggcattccatatatgtttatatacacgtctgacagatttactttcctaataatcttttgtttaggctaataataaaatgaaactgtgggctaatacaccagcgatagagctgatgttgtaatggggtatgctaggtaataagtcatgtgggtctagaactaagaataatccatgaaatggggcattcacacctggctatgcatt

SEQ ID NO: 712 - DNA, 492 bp, Homo Sapiens
  misc_feature (451)..(451): n is a, c, g, t or u
  misc_feature (458)..(458): n is a, c, g, t or u
taagagggaaacattcattatgcaaaatttaaatagactttgaaatttttttggtgaagtttgtagcatttagacttctgaagttatgaaagcttcaacctgcaccaagacttttgaagaacactgcatatggaaaacacagacctaagtgtaaaaccctctgtctgttatactcatttgcatactgattgtattgtaagttcttgaggacaagtcttcatttaacaaacagaaagatacagcccctacattgaaagagctcaggtctaatgatgcaggcagataagtcacctagcagaacccactggatgctcaggattcagctcagccacagggccacagggcaaagatggctatctaggacagtggggaagtgagccagatagagagcagagaactttttgttttggttggttggtttttggagaccaagtctcagttactctgcggncccagcngaagggcaagtgggtgccatccttggctcactgc

SEQ ID NO: 713 - DNA, 443 bp, Homo Sapiens
tgaacagagagaacaggtcagaaaaatgaagaagcaagaaaggcaagccaagtaatcactactatgtgaccaaaatgcttttattggaatgactcaacagtagaaattaccattcgaggatatggaaaacaaagaatcaatgctcatcatctttaaaaagagttcaacataaaccacaataaattttatcatactattaaaactattacctataaactctgccaatcgagttagtcttccattcagtaatacactatacatatttgaattttttagcttttgttggtacaatattacatcttgaaaatagaactctccgatcttcttatcagttcttaaaatggatttttaagtttgtgtacaaggggggaagaccataaaatatgctgtcctccattgtataaggcctagttattagataggtaattttttaaaggattttc

SEQ ID NO: 714 - DNA, 405 bp, Homo Sapiens
  misc_feature (314)..(314): n is a, c, g, t or u
ttttacattgacaggtttattcttaaagcttgaacaaatacatctttacacacacacaagttggtaaaaagtaagcccttactgctttgttaaaaataaaacccatacataaagctttccggtcaaattcccgaaacatgaaaacatcacatttctacaatacatctgcttttttgattcatgtgtgttttcaacacaactcaacaactcattccgatctacccaaacaaagagaaaactaacttccagaccatgaaggaaaaaaaaatacatgcctcttataactgttaaagacaagtagctatagaattctngaaaattctcaataaatagttactagtataaaaatgcttaactccatatagctcacctttaatccaagggcagtaccagttatcgccataa

SEQ ID NO: 715 - DNA, 430 bp, Homo Sapiens
  misc_feature (108)..(108): n is a, c, g, t or u
tgcagagatgaagtattgccatgttgcccaggctggtttggaactcctggcctcaagcaatcctctcaccttcacctcccaaagtactgggattacaggcgtgacacncacattcagccctgaactttgacattctttccccagaccactatgctgttctgtcatttctgaacttcaatatttcatcaaaactttttttttcatatttttccattgaaattgccatttttctgaaaatatttttccatatgatcatttttcaaattacaacagaatatatgctctttgtaacaagtaaaaacagtatcattcaaacatgtataaaggtaatcatcttttccttcagctccctcttcctaacagtaagaagcatggctcccagtaagaagcatggctcccatttactaccaatatatttatcaatcccctg

SEQ ID NO: 716 - DNA, 475 bp, Homo Sapiens
aaaggaagaaataaactgtctttatctgcagttgacatggctgccaaagaactgacaaatgcctggtgcaaagtcccagcatacaagattaatatacaaaagtcagttgctttcctatatactagtaatgaacaattagaacttgaaatgtaaaagtaccatttacaatagcagtccccaaatgcagaatgtgagaaaagaattttaatgtatcacaaatgtatgaaacaatctcactgaaagggatgggggaataaggtactgacataggtaaatttggaaatgagtggagtctgtaagaccaaaggcaaaaggaactgtacatagcactctactccagttgataaagttgttttccacaggggcacaggtttacaattttgaagccactatatatttatataattaataaacaattagtaaaatggatggcagatagtaggagacaggtttctcacagttgggagtagaaggg

SEQ ID NO: 717 - DNA, 393 bp, Homo Sapiens
  misc_feature (353)..(353): n is a, c, g, t or u
  misc_feature (380)..(380): n is a, c, g, t or u
ttttgagacagagtctcgctctgttgcccatttctggtattttgaagtatccttttctttctttctctgacatatttaaaactgcacgtatctagagtacacaattttaatgagctttaacatatgtagacacctgtaaaaccaccatcacgatcaagaaaataaatagagcaaggcgcggtggctcacgcctgtaatcccaacacattggaaggctgaggtgggcggatcacttgaggtcaggagagtttgagaccagcctggccaagatggtgaaactcttgcctctactaaaaatacaaaaattagccaaggtgtggtagtgcatgcctgtattcccggctactcagggnggctgttgcacaagaacttgctggganccaggaggccgga

SEQ ID NO: 718 - DNA, 427 bp, Homo Sapiens
  misc_feature (309)..(309): n is a, c, g, t or u
  misc_feature (416)..(416): n is a, c, g, t or u
ataataaaaaatatcaaaaaagtagtgaagtttagctagatatgtacattttctgtatcagtgattgcaaacttggaacctgttcaatgattttgaaagaccctctgaatggggcagtgcataattaggattattatgcaaggacatttttgcttatctgtggtggtagatatataatgaaaactatacacagaccatttgtgtgtgtgtgtgtgtgtgtgtgtgtgtgtgtgtgtgtgtgtgtgtgtattttatgtgtggcccacgacacttcttcttccactgtggcccagggaagacaaaagattnggacacctctgctttaattcttatcaaaattatggcaggtttgtttgtagacacttacaagcttattctgaatttttatggaaaggcaagggacaagaaaagctaangccattctgaa

SEQ ID NO: 719 - DNA, 482 bp, Homo Sapiens
  misc_feature (123)..(123): n is a, c, g, t or u
  misc_feature (218)..(218): n is a, c, g, t or u
  misc_feature (318)..(318): n is a, c, g, t or u
  misc_feature (402)..(402): n is a, c, g, t or u
  misc_feature (423)..(423): n is a, c, g, t or u
  misc_feature (456)..(456): n is a, c, g, t or u
  misc_feature (471)..(471): n is a, c, g, t or u
attgagacagaatcttgctctgtcgcgcaggctggagtgcagtggccaatctcagctcactgcaagctccgcctcccacgttcacgccattctcctgcctcagcctccaaaatgttcctttcnaaaaatacaaactcagaaagtatttacatgaagcattcgagtatttcacaaataaatgcttacctattctacattcaatacgagaattttaatcnctattttaaagtacatttttaataaatatgcatatttgcaaacgtatcctatctcttgctcttgatttattcagccattatcagtgtgtaatacttagcnttgcattatagacttctaaatcaggggaaaaaatcatataaaggaaaggactacagaacaagctcttggactggcaacggtccnatcttattcacatttggtacncgtggttggtttagaagaatactgggaacatcnattcactccaaaaanaagtaactgga

SEQ ID NO: 720 - DNA, 419 bp, Homo Sapiens
  misc_feature (289)..(289): n is a, c, g, t or u
  misc_feature (384)..(384): n is a, c, g, t or u
gcagtgaagccaatatagttttattggatccaatgcactaccactaaaacaaatatatgtacactcaggccaatacacttttattaaaacaaatagaatttaattcaaaccagcattcaatacgttttctcaaagcaatgaaattaagctgtaccagtacttctgctcaatatgttttcccaatcaaatccatttgaacaaagtgaaatatatttatcatagatagcacatttttattaaaaacaaattcactgaaaccaagtttccctttgaactgatagatagaaantctaaccaattgcacaattagatcatagaaacggatgtatttttactttagcaaaaagcatttctgttcaggtccacttttaaaacacactaatngaataataaaagttgctccaacaatgtctttaatg

SEQ ID NO: 721 - DNA, 151 bp, Homo Sapiens
  misc_feature (139)..(139): n is a, c, g, t or u
  misc_feature (150)..(150): n is a, c, g, t or u
taaaacagcaagtatgtactatttcacacagtttctgtgggtcaggaatccagaagcggctgagatgggtagtttaggatcagggtctctcacaaggctttggtccaggtgcaggctgcagtcctccagaggcgggaantggggctggang

SEQ ID NO: 722 - DNA, 162 bp, Homo Sapiens
tgagacagagtctcactctgttgcccaggtagtggcacaatcattgctcactgcaacctccacctcctgggtccaagtgattctcattcaagtgcctaagcctcccaagtagctgggattacaggatcccacccccatgctcagccaatgtttggaatcctt

SEQ ID NO: 723 - DNA, 270 bp, Homo Sapiens
  misc_feature (245)..(245): n is a, c, g, t or u
  misc_feature (265)..(265): n is a, c, g, t or u
atattaatgttcatcgattattatgactctgaattactgtgaggttaaattatagtaatccccccttatctgcagtttcactttccagttttagttactcttggtctgaaaatattaaattgaaaacttcagtaataaataattcataagatttaagttgtgtgccattctgggtagcgtgatgagatcctacaccttccctctctgtcctgcccaggacgtgaatcatcccttggtcctgtagntccccccaagaaaatggccngccca

SEQ ID NO: 724 - DNA, 450 bp, Homo Sapiens
  misc_feature (126)..(126): n is a, c, g, t or u
  misc_feature (152)..(152): n is a, c, g, t or u
  misc_feature (210)..(210): n is a, c, g, t or u
  misc_feature (215)..(215): n is a, c, g, t or u
  misc_feature (255)..(255): n is a, c, g, t or u
  misc_feature (273)..(273): n is a, c, g, t or u
  misc_feature (285)..(285): n is a, c, g, t or u
  misc_feature (385)..(385): n is a, c, g, t or u
  misc_feature (406)..(406): n is a, c, g, t or u
  misc_feature (411)..(411): n is a, c, g, t or u
  misc_feature (418)..(418): n is a, c, g, t or u
  misc_feature (432)..(432): n is a, c, g, t or u
  misc_feature (450)..(450): n is a, c, g, t or u
gcgaccgcccccgcaagatctcggctcccagaggaagcacccgctcccaggagttgtgggatcggtcttgagggtctgggcagccgagtgggagcagaaaccacactggtcctcccacccgcgcanctctcagggccggggcgagcgcgccngcggggtttttgctagcctttgctgtgtcctggcctcaacggcgccgcgcgggaaaantttgnagggcaggcggcgggaagttatttaagcactggctcgaantgaggacagagaactggncagggggttacncagggccaattcttgggccattccgccccaaggaacatggagctgtccccaagctttcttgagccccgccgggaaacgctttctcggctaatctttctgncaacttttacaaagctgcctnctccncatttanatctctgaaaacanatcctgggcgtccggagn

SEQ ID NO: 725 - DNA, 180 bp, Homo Sapiens
  misc_feature (172)..(172): n is a, c, g, t or u
ccgttaatattttcagtttattttccagatatattaaaattctgtatagttccatccaaatattggaatttaggaatcatcccagataattttccctgtcctttatttctctgttccacccttcctttggtaagtgttcacattatttatcatttttctttctcttgcttanaagctgtt

SEQ ID NO: 726 - DNA, 490 bp, Homo Sapiens
  misc_feature (36)..(37): n is a, c, g, t or u
  misc_feature (39)..(40): n is a, c, g, t or u
  misc_feature (436)..(436): n is a, c, g, t or u
  misc_feature (474)..(474): n is a, c, g, t or u
gaaaggtaagagagtctttaaggaggccgaaaaganntnngatcatgtcacagtgaccttgaaatgtaaagacccagaatgctttaatgtcctttttagcttgatcccctttctttagttatagagattctgtaggaagaatttcctttcaatttatcttggctgctgcttttgatcctctgggggtagaggtctatttgggtacagttgtttagtcttctgctgagccagagctaggcaatgacggatgtggtcctttcttccatgctgtaatggaaatagagaaggctggctacactgttcctcatgggacgacttgctattttcctcaaggtacaggcagctccagttcatctctcaacttgggcagtgtaaatctgtggtctgtggatggattggtggagcagttgttgccaactctgtagagaacatttcntgttcccccttggggcagacacaagtggatggtttccntgcctgttgatggagt

SEQ ID NO: 727 - DNA, 585 bp, Homo Sapiens
  misc_feature (19)..(19): n is a, c, g, t or u
  misc_feature (445)..(445): n is a, c, g, t or u
  misc_feature (497)..(497): n is a, c, g, t or u
  misc_feature (504)..(504): n is a, c, g, t or u
  misc_feature (542)..(542): n is a, c, g, t or u
  misc_feature (551)..(551): n is a, c, g, t or u
  misc_feature (560)..(560): n is a, c, g, t or u
  misc_feature (584)..(584): n is a, c, g, t or u
taatgtgctaacatcaatnggaccacaatgggccggacatggtggctcatgcctgtaatcccagcatgttgggaggctgaggctgaaggatcacttgaggccaggagttcaaaaccagcctaggtgacatagcgagacccagtctaccaaaaaaacttaatttaaaatgaacaataatgaagtccagaaaaagaacatacaaatttgtgataaatgtgacatctcaaatcaatatagtggaaagaagacttaataaactactttagaacaaaatttactattatttaaatgcaggaagcaaatttgattcctatcttatactatatacgaaatatattctggaatacattaaaaatcaaatgtaagaaatggagcctggaagataattaactattttcctacattatctcagaatatagaaagcctaagttaagacttaaaaccnaaagccaccaaaggaaaaaaactggactatgtaaatccaaagcttctacacnggagacngtaaccaactgggaaaaatatttaccatttattaatgnggtaaaagnttaatagcnatgattacaactctccaaaatggnt

SEQ ID NO: 728 - DNA, 436 bp, Homo Sapiens
  misc_feature (355)..(355): n is a, c, g, t or u
gaatctttatcttgtccttttattgttagttggcatgcaataattgtacatatttatggaaacagagtgatattttgatacaggtgtacaatgcataatgatcaaatcagggtaattagcatttcaaacacctcaaacatttatcatacttttgtgttgacaacattcaaaatcttctcttctagctttttgaaaatataccataaattatagttatttccatgcgaccagctatagagcactacaacagaacttattcctccagtatagctataattttgtgtccattaaccaacctctgctcccacatccttcccaacatctaataaccacaattctaccatttactttaatngagctcaaatttgtttagttcctgcatatgggtaaggacagacagtattaatttttctgtgtctgacttattccacttaac

SEQ ID NO: 729 - DNA, 438 bp, Homo Sapiens
caaagtttaattcaattttattttccacttttagtatttttcaaattatacaacatgcagtctgccagagtacccatacatcttcattttagaacctagaagattaccaaaattttccgtgggccagaggagggtgacttccagatcttttgttacatggactatagtacagcatcgttattgatataaaccaccattctcccctcaaaccccccggacaagtttgtccacaatttttttaatgtgaaagctactgtacagatacataaagcccagagaacacacatctgcagtacacaggacacactttacaaactagacatgtataattctacagaatgccctattccccttatatctggcacacaatgaacagtatttaaaactggatacacaatttttaaataagtaagcagacttcatggagcggcgccctcg

SEQ ID NO: 730 - DNA, 413 bp, Homo Sapiens
  misc_feature (143)..(143): n is a, c, g, t or u
  misc_feature (380)..(380): n is a, c, g, t or u
  misc_feature (387)..(387): n is a, c, g, t or u
tgaagacttaccttctgttaatacttagattacttaaaagcaacaggcttgttatttgatcataataaaatgttttaacaaagctactggtgcaaagggtgagaaggtggcttaaatccacattctaaaacacattataactngaaataactgaaatatacactatataaaaaacattataactgaaatatacagaaatcactcgaatatattatcctactgactcattccttctgtttattactgtattgccacattggagttccatatttccagctattctttctacggtacaaatggttccacactaccaaagagaaaagaaaagctcactgagctttaaccctgagagaactcagagaaaaatacccctggtggcnggtatcncacagggttatacccgggaaaaggaa

SEQ ID NO: 731 - DNA, 404 bp, Homo Sapiens
  misc_feature (343)..(343): n is a, c, g, t or u
  misc_feature (357)..(357): n is a, c, g, t or u
  misc_feature (366)..(366): n is a, c, g, t or u
  misc_feature (377)..(377): n is a, c, g, t or u
  misc_feature (384)..(384): n is a, c, g, t or u
  misc_feature (390)..(390): n is a, c, g, t or u
taataaaagcaaactaaaactcggaggaagaaaaagaaaccattagaagcttttgactcgggtcaatgttgtttccaaattgggtttaattccattcaaagagaaagaaggggagggtgcagaaaaggccactcagatcgactctggaagagatcatcaagaccagggaagcatttggatggtacagctggtctcttcccagccagactgggaggacatgccacaacctcccaaggctgtgaacctaggaaataagtgctgaccaaataacatatttcaatgtttgtagaaaagctggcaggaaagggagatgatgggattcagattcacagggccatgcagnttaaggccttaatncaaaatttnattgccttgancctgagntaaggnaaccccctaaattt

SEQ ID NO: 732 - DNA, 590 bp, Homo Sapiens
  misc_feature (463)..(463): n is a, c, g, t or u
  misc_feature (503)..(503): n is a, c, g, t or u
  misc_feature (530)..(530): n is a, c, g, t or u
  misc_feature (542)..(542): n is a, c, g, t or u
  misc_feature (552)..(552): n is a, c, g, t or u
  misc_feature (558)..(558): n is a, c, g, t or u
  misc_feature (563)..(563): n is a, c, g, t or u
  misc_feature (581)..(581): n is a, c, g, t or u
tacaatggaacaaagaaagagtttatcaaatgctttggaatccctgagagtagaaggctcagcatcgccaaagcttgggttgtaacttttttgctgtgtaactggattgaaatccagccagcccaggtgacctccctgcagagccaggcccctccatattaagattccgcctttgtctggctgaagtttaagtcaagtctccacattaggttagcagcagtctcccaggtttttcttcctctgctggtatctgcaaagttgcaaactgcagtagcctctgtatctgctggaagaggataggccacggccaggtaacaaattaaccctgaaatctcatgggcgtaacacatcgcagtccaaatgcatcgggcggctcttcttaatgaggacttgctccagttgctctgtcttgcgatcctgccacttaagcacaggctctgtgcagttgcttttgaaagctctnccccatgatcatgtaaactgggaagctgggtggcgtcaantttgtgggcttcagtgatccctgacanaccaatgggganttccaggaantttganttagnagttaaaccaaggccgcnttcacctga

SEQ ID NO: 733 - DNA, 354 bp, Homo Sapiens
  misc_feature (6)..(6): n is a, c, g, t or u
  misc_feature (8)..(9): n is a, c, g, t or u
ttaaantnntgtaatttagagaactttttttattaattttttgagatggaatcttactcttttgcttagtctgaagtgcaatggcataatcatagctcactataaccttaacttcttgggtttgagcagtcctcctgcatcaacctcttaattacctaggactataggcatgcacctccaggcctggctaactttatttatttatttatttatttattttttcaagatggtgtcttgctctgtgggccaggctagagtgtagtggcatgatcttagctcaatgcaacctccgcctcccaggctcaagcaattctcttgcttcaaccttttgagtagctgggcattacaggcgca

SEQ ID NO: 734 - DNA, 426 bp, Homo Sapiens
  misc_feature (38)..(38): n is a, c, g, t or u
  misc_feature (110)..(110): n is a, c, g, t or u
  misc_feature (218)..(218): n is a, c, g, t or u
  misc_feature (287)..(287): n is a, c, g, t or u
  misc_feature (311)..(311): n is a, c, g, t or u
  misc_feature (324)..(324): n is a, c, g, t or u
  misc_feature (333)..(333): n is a, c, g, t or u
  misc_feature (343)..(343): n is a, c, g, t or u
  misc_feature (421)..(421): n is a, c, g, t or u
tttcatttcaaaaggtgtttaacttatacagtatgggnttaagattcagaaaatgatgtaaaaagaaaattcctaatacaaaggctaaagtataagcctatatattactnagataattaaaatccaaaatctacctgggggaggaaaaaaattccttaaagtagaggtagaagtagtcatgtgtgaactgaggattttttgtttgtttgagacagggntttttgtgttgcccaggctgggagtgcaggtgaatgaccatggggtcacctgccaccctccgcctcttngggcctccaagcccatcctccccnaggtaggttgggncccacaggnctcaggtccnaaccacaccccaggcttggatttttggacctttttttgtaaaggcaggggggcctccattatggttgtccagggggtnggccc

SEQ ID NO: 735 - DNA, 401 bp, Homo Sapiens
  misc_feature (47)..(47): n is a, c, g, t or u
  misc_feature (71)..(71): n is a, c, g, t or u
  misc_feature (148)..(148): n is a, c, g, t or u
  misc_feature (267)..(267): n is a, c, g, t or u
  misc_feature (295)..(295): n is a, c, g, t or u
  misc_feature (368)..(368): n is a, c, g, t or u
  misc_feature (376)..(376): n is a, c, g, t or u
  misc_feature (389)..(389): n is a, c, g, t or u
  misc_feature (395)..(395): n is a, c, g, t or u
gagacagggtctcactgtttttcccaagctgctatcaaactcctggnctcaagtgatccctttgccttggnctcccagagcgctgggattgcagtgctgagctaccacatgcaggctataattttaaatgaatgatttatccaaaganttaacattcccttaagaaagaaaaaaaaaatctatgacagaagcaggggattgatattataatgttttaggtcatttcttctcaatattctctttgtttcaaaaaattaatatctcccnatttgcattcatatttttaatacatggnattccaatatggttttattaaatatgggtttttttaaacagcggtgggggaccgcctatttttttaaaaggcntggggganttttgggaccatnccccgnttgggg

SEQ ID NO: 736 - DNA, 442 bp, Homo Sapiens
  misc_feature (342)..(342): n is a, c, g, t or u
  misc_feature (406)..(406): n is a, c, g, t or u
  misc_feature (436)..(436): n is a, c, g, t or u
atttgaaaacagttgagcacacagttgagcatccactaacacttgtggaagggaagggaagaaagcaggattgggcagagtaggaagtgaagctacctgcagtcccaatatcagtgtcagcctgggcagttcttgagttagaatggccatccagagttgtctagactgcacgtgagccatcccaggaaggacataacctcgcggaaagtggctttctgaagctgagacaattccctgaagtgctgacatctgaaagctgtctactgtcagcactcccagcaactggggacacccaagtctttcccttggaaatgagagttggggttatacccagagtatccncttacagacatgtattgaaggagacaataaaaccaaaacttcttgcaggctttgaatgatcccntttcagggcaagggacaatgcttgatgttnggcttt

SEQ ID NO: 737 - DNA, 492 bp, Homo Sapiens
  misc_feature (380)..(380): n is a, c, g, t or u
  misc_feature (422)..(422): n is a, c, g, t or u
  misc_feature (439)..(439): n is a, c, g, t or u
  misc_feature (450)..(450): n is a, c, g, t or u
  misc_feature (466)..(466): n is a, c, g, t or u
  misc_feature (487)..(487): n is a, c, g, t or u
ttttttttcttacaaagcaagttactttattagcattttaaacaatgtataacgtgatggaatcattctaacaacacatctattcactgcttacaattccaactaatttcagttctttgatatctaatgacaagagcgaagacctgttaaagttccttccaccagtaaaactcacagctcaaagttgtgggagtgattaactgagccacaggcttcattcacatgtttaccacattaaaataccacacagtgttttcttataaggtcaaccaactggggaagcaattaacattaggcatttaaggttttaaactgttagggcacaggggcttaaatcagggcatttattatggaaaacttgtggggttccctaggttcanggtccaaaccaaattcccccaaattattttcaggctttggtnaccggttttggtccttncctcttcttgnggggccatttttttgnggggccttggcttttgggggnatagg

SEQ ID NO: 738 - DNA, 458 bp, Homo Sapiens
  misc_feature (448)..(448): n is a, c, g, t or u
tttttttttggtgttttctttttttttgtatttgcgcagaccattttaagattttcagtctcaacaaaacactattaaaacaaagaatctagtaaaatattgtgcatgtactgctaaacaattctagcaattttattaagcaatacctttattatttttgaatattcttaacagactggaacgaaacatttttttttcaaaacaaaatatgcatactgtacgcatgtcgcagggttaagtatgatgcagaggttaaagtctgtttgaacaaaaacaaatgcccggggaaatttcatagctataaagttaataactaaattttgttcactaaggaggaccttttctatgggatttccttcatctctcagtcacactggcaaactttatctggaaggtggcacttccccaaggtgtaggttaggaggattagggaaggggaatgttaaantttttttttt

SEQ ID NO: 739 - DNA, 474 bp, Homo Sapiens
  misc_feature (272)..(272): n is a, c, g, t or u
  misc_feature (349)..(349): n is a, c, g, t or u
  misc_feature (358)..(358): n is a, c, g, t or u
  misc_feature (429)..(429): n is a, c, g, t or u
  misc_feature (445)..(445): n is a, c, g, t or u
ttttttttgaacttcaatgtgattttttaatatttaaatataattttgattacttagaatttttcccaaggcaaatataatttgtctacattggaacacataaacaacaacccagaatatgctgccatggaatgttcccagaaatacatttaacagtttattataaatggtaaacaactcatcactcaacatttataatactaagcatattctttaaacttaaccacattctatttcccctcagacagttaacttttctatgtgcctggggncagctctaaggtttttaaaatgcaggactgctgtgtttccactggacaggtttaaattcacttttaatttttggggnattcaggantatctacccaccaacaggcaggttatggagggattcaggaggtttggcctaattttggccccttggaaatngtacctcccccctcancctcacaggggggccggggcaggccacat

SEQ ID NO: 740 - DNA, 477 bp, Homo Sapiens
  misc_feature (125)..(125): n is a, c, g, t or u
  misc_feature (128)..(128): n is a, c, g, t or u
  misc_feature (369)..(369): n is a, c, g, t or u
  misc_feature (416)..(416): n is a, c, g, t or u
  misc_feature (467)..(467): n is a, c, g, t or u
ttttttttaactttttgtagagatggggtctcactgtgttgcccagactggtctccaagtcctgggctcaagtgatcctcccgcctcggcctcccaaagtgctgggatgacaggcatgaacaccncgntggcctgatttgaatgttaatgtgtcacacatgcatcttccctggaagatcttggcaaaatgcttgtctctctggtcttttaaacatgacttggtgctgaaagacacactgctgggacccaagttccctcccacatggaccgggatggaggctggagccaaggtttcagggaaacgtatgtggcctgtgccctgggtgtgatcatgggcacacacatttatctggcagggcagccttggtncttgaggggtcatgggcacagaggaggccatctggtgacacttaggncagtgtttcccacagcagggagaataaggattaagattagtttttccacancccttcagat

SEQ ID NO: 741 - DNA, 495 bp, Homo Sapiens
  misc_feature (394)..(394): n is a, c, g, t or u
  misc_feature (426)..(426): n is a, c, g, t or u
  misc_feature (446)..(446): n is a, c, g, t or u
  misc_feature (457)..(457): n is a, c, g, t or u
  misc_feature (466)..(466): n is a, c, g, t or u
  misc_feature (480)..(480): n is a, c, g, t or u
ttttttttctttcttaaagtttatttgcaatatcattatgtataaataattattatttataaattttggctctaacattgagccaaaaacatccattcacatactcaacaatcagacttgacaaagatgacatagctctcgaactttagaggttaagttaaagaaaaattagaaaaccattcgacatatttgtagttaaagcagagtaacgttggaaaggtgggggggtgatcccagtgactcctaaattgtcatgttccatcttagagcataattgttaaaatcttcctcttatttgtgagggatcataggatggcctgaagttctttgcatgtacagaaggaaatcccaaggaaattaacatttggctttgggggggtgatcccaatgactncctaaattgtcatggggccctcttagggggcntaattggttaaaattttccncttattttttnagggggtcntaggggtgggcctnaaggttcttttgcat

SEQ ID NO: 742 - DNA, 386 bp, Homo Sapiens
  misc_feature (148)..(148): n is a, c, g, t or u
  misc_feature (213)..(213): n is a, c, g, t or u
  misc_feature (265)..(265): n is a, c, g, t or u
  misc_feature (307)..(307): n is a, c, g, t or u
  misc_feature (377)..(377): n is a, c, g, t or u
  misc_feature (383)..(383): n is a, c, g, t or u
tttcatttcagaaattgcaagtttatttcagattttaggaaaggagatccaacattaggactaataaaactgaaatgaccttctgcaaaatgtagaacttttttttttgtaatgagttgtttctacccagggattaatattttttgantaaaaaataaagttaccagagtgcctttattaggtgcatatatcttaggtctgggttcccagganttgggaaatgggattgggaggttcatttatccatacttgcatttcaagggantcttgatggaatttaagggatttacccctaggggtcgtaggnaccacaaggcttacttggctcacagtggtaataaatacattgcccctggaacccccattaattccaatgntaattnggg

SEQ ID NO: 743 - DNA, 328 bp, Homo Sapiens
  misc_feature (321)..(321): n is a, c, g, t or u
catatagatatgcatacatatccacacacacgcatgtgtaatatatattttatgtgcatgtacacaaaatttacaatgtgtgtgtgtgcatacacaggcacacatatttttttaagccaggccttaattacattatatcattctgcttgttcccatctgcttttaactcccaccttttattccattcagggaaatggaaaatattccacacccttcagactaggcctaattaacagtggggaaattaaagggtaccctattggttggaaatggtaccttaccatctggttaccttattctgggaaattacattaaaactgnggatggg

SEQ ID NO: 744 - DNA, 467 bp, Homo Sapiens
  misc_feature (300)..(300): n is a, c, g, t or u
tttttttttcatagtattaatgtattgtacgtgttttcaaatattttctcatatatgaaaagggccattccacagtgttctttgtaagctttccctcacatcattgttttggatgaggctttatgcttctcaaagcagtgagataacagataacacagaagccatgtgctggcacttctattcaggttggcatggctcaaccattttgagtcaaatttctgtctagtctagtaggaccatttcctaaagttgtatccatactaggaaggcagatatgaagaaatgctgctatgctaccantcagaataatgtaggctttggggtcctggggctggtaaagcctggggtatgatggctaaattgagctgttcttacccagatgaggcttatggtcatctgctctgtctccaaaggtaatcagccactgcacatgaggtttactacactgcacacgcatgtgtgtttct

SEQ ID NO: 745 - DNA, 405 bp, Homo Sapiens
  misc_feature (17)..(17): n is a, c, g, t or u
  misc_feature (55)..(55): n is a, c, g, t or u
  misc_feature (101)..(101): n is a, c, g, t or u
  misc_feature (263)..(263): n is a, c, g, t or u
  misc_feature (329)..(329): n is a, c, g, t or u
  misc_feature (339)..(339): n is a, c, g, t or u
  misc_feature (348)..(348): n is a, c, g, t or u
  misc_feature (386)..(386): n is a, c, g, t or u
ttttttttttgcatagnaaactctataatataatgggaaaataattgaaggaganttggaagaagtttttatgtggcttttctattgataaaagccaaggnaccatttcaataactcaataaaggttaaactaagtgtgattcaacttcctgatgacttaacactttagataaagactagaggtgtggtgacaccaaccttcacttaacttgggataaagagttccttctcagtctgcttttgacatgagctaaagagaagantaaggtttttgttaccctaggtaaggggcatatttgtccatataatctggggaattaagggttagntaggggcctntctttgatnaatgccaaggttgtaattaatcctcttggaattatccncccataatataattttttg

SEQ ID NO: 746 - DNA, 425 bp, Homo Sapiens
  misc_feature (216)..(216): n is a, c, g, t or u
  misc_feature (326)..(327): n is a, c, g, t or u
  misc_feature (329)..(329): n is a, c, g, t or u
  misc_feature (354)..(354): n is a, c, g, t or u
tttttttttattctaaaatacaacgtttattaaaaaaacatgcgatcttgccaataggcaattccatgagaacaaaagattttttttcccacctacaagtctttttagagaaacaaacggaactatttccagatgaggcggggtgtctgggaggggctgtgggtggtctggggctggtgactggtgaggttgggtggccctctgggggtccgggangcactttccgttttgcttctgttggagatgttcccgtcggatgctgaagaacaagcctgccaggctgggccactcccgacctggggctgtggcacccgtgtggccctcgnncntcctgggccttgagaaaggggagtnagaaggagccacttgtcctgatatggggcaaaacttcgggggtcactggtctcatgcttccaaggccccgt

SEQ ID NO: 747 - DNA, 394 bp, Homo Sapiens
  misc_feature (329)..(329): n is a, c, g, t or u
  misc_feature (379)..(379): n is a, c, g, t or u
  misc_feature (392)..(392): n is a, c, g, t or u
ttttttttttttttttttttaaaattcagtaatgattttattacctcatttgagatcatttcattgtccaagttattctcttttttcagtagcaacagcaaatttggtaagaaagcaaaatccagcagttctcatacaaatattgcaagaattttgttaaaatattttagggtacatagtgatttcagaatatgtattattataggtacctttaggctggctgtacaaatacgtccaatgtttgtatcttgggctgaaggtacaataaaaggcttatctggtcactttacaaaagaggctcaagggcaaatgttcccggttgggcaagnggcaggctgtccacccctgaggcacccgggggttaaccaagttttcttgncccctttaccctngg

SEQ ID NO: 748 - DNA, 406 bp, Homo Sapiens
  misc_feature (350)..(350): n is a, c, g, t or u
  misc_feature (379)..(379): n is a, c, g, t or u
  misc_feature (398)..(398): n is a, c, g, t or u
ttttttttttttaagggatttagtatgtgataattatattgtctgaaaatgagaatatattttttcttccagtctttaaatattttatttattttttcatttttattcattgtgcattattttaacacagaaacaataaactcttcctttaaaatagatacctaaatgataaataacaatctgtaggaatttacttgccaattagggtaataaggcaaaatacaagtcagagacctaaaacaactatccaaaaaaatttttgtaggactggaataaaatattttgtggaacatttggaggggatgtcattggcttacaaacaaccaattctggacttgcaaatttctccnttctatggtcttcttacttctggtggacntcatacacacttggggggnggaacggg

SEQ ID NO: 749 - DNA, 385 bp, Homo Sapiens
  misc_feature (26)..(26): n is a, c, g, t or u
  misc_feature (341)..(341): n is a, c, g, t or u
  misc_feature (356)..(356): n is a, c, g, t or u
tttttttttctcgttaattctaattntaaaaaagagtttggtatggttttaaagtttccattgaacctctgaaggtggcttatgtctcgactcctcttctaggactggtcatgagctgacaagcatagaggcaaagtatctcaacattacaaaacccccaatcttcaaggaaaggagcacattaccatggagccacaggactccaaaggacctcagaaagcatttagccaaatctccttatgcaggaaataaatgagaatttaaggctcagatgggttaaggtgatttgtcaaggtcataaggaacttgtcagttccagacttgtagtccggggctgcgtncttttgtaaaccagnaaacgtctgcataggaaaggattaatcca

SEQ ID NO: 750 - DNA, 360 bp, Homo Sapiens
  misc_feature (215)..(215): n is a, c, g, t or u
  misc_feature (296)..(296): n is a, c, g, t or u
  misc_feature (327)..(327): n is a, c, g, t or u
  misc_feature (351)..(351): n is a, c, g, t or u
ttttttttcagaaagccatctaacatttatttaacatattttacgtgccattcattattctaggtgttttacattcatccacataaaacatcacggttgttcaatccacaaaacaaccctgaaaggaagtaaatcctccattttacagataggaaaataggcttagagagattaaacgttttattcaaggtcacagggctaaaagagtagcaganttctcagtcacttgattccgcttatcagacacagaagtaggacttcaggttaggaagaagggactagaagttgaccagggngggaaatctacactctctctcaagcttaggncaaagagaactgcctaaaaccccnctggcttcc

SEQ ID NO: 751 - DNA, 320 bp, Homo Sapiens
  misc_feature (22)..(22): n is a, c, g, t or u
  misc_feature (175)..(175): n is a, c, g, t or u
  misc_feature (206)..(206): n is a, c, g, t or u
  misc_feature (224)..(224): n is a, c, g, t or u
  misc_feature (250)..(250): n is a, c, g, t or u
  misc_feature (298)..(298): n is a, c, g, t or u
ttttttttttccctgtcctggnacctttaacttctcttatgttgccgaatggaacacttatctccttcttcaggccccactttggggtttaggtggatatcttaaatgtcagagaagacagaaaaggagaggaaggatgatgaaagtgcttcagtgaaattgtggggggcgggtnggggggggctctgttctactcccctaggctntttgggtaggactggatnctttctgcaattcttgggagaggctncgtatctaaaggcctgcaggaaaagaagaggtgaaaggagtggatttnctgctcttgttatagagagccc

SEQ ID NO: 752 - DNA, 444 bp, Homo Sapiens
  misc_feature (360)..(360): n is a, c, g, t or u
  misc_feature (408)..(408): n is a, c, g, t or u
  misc_feature (419)..(419): n is a, c, g, t or u
  misc_feature (437)..(437): n is a, c, g, t or u
gttcgaacccaggatcacagattgcatttagttgttatgtctctttagtctcattttatctggaacagttcctcagcctttctgtctcttgaccttaatatttttgaaaggtacaggcaagttattttgtagaatgtccctcaacatggatttgtttgatgtttcctcctaagattcaagttataaatttttcacaggaataccaaagaattgacactttgtccttcttagtatatcacatcaagaggcatatgatgttgattcatcccaatattgggtgatgctagctttaattgcttgggttaaggttatatccaccttttgtaattaaaaaggtaatgtgtgggggaaacacttgcnggaatatgtaaaatattctgttcctcatccaaactttgactgttgggntttccgtatcnggctgaggactttttttntttttaa

SEQ ID NO: 753 - DNA, 458 bp, Homo Sapiens
  misc_feature (23)..(23): n is a, c, g, t or u
  misc_feature (372)..(372): n is a, c, g, t or u
  misc_feature (382)..(382): n is a, c, g, t or u
  misc_feature (415)..(415): n is a, c, g, t or u
ttttttttttattaaaaaaaganctaaaaagaacactttattgtgataataataatggcttcatttcacatcagaatttcaactagtaaaaattctatttacaggtgtcatctgctagaactagtcaatcttgttttatattgtgagtttttctttccccaattacttatacaaatcagatggtggagtacatgataagaagtttagatttgcttctaatttggcacatgatgtaacaatttcctttctctatcatttattactttggaagcttttggtttctttgtttgggcatctaaattgtttaaaatcaccttgccttttagttcatgggagacaatggcatatctttttcatagtctacaccctagnaacaaccatnacccaatatttttgggcaccacggaccagtttncgtgggaagccaatttttccacagaccggggggtggggggttt

SEQ ID NO: 754 - DNA, 430 bp, Homo Sapiens
  misc_feature (221)..(221): n is a, c, g, t or u
  misc_feature (383)..(383): n is a, c, g, t or u
  misc_feature (394)..(394): n is a, c, g, t or u
  misc_feature (404)..(404): n is a, c, g, t or u
ttttttttgttcaataatagttttatttacttatttcactgttaacttggggataatattcaccacaaagttgcaggcatcattttatagtacagactacagacgattgactttttcaagattaaaaatgaacatggtttgtgacacacctgaaatgcctactgaggaagtgctggccacgaggtaataaaaaaaggtaaaattcagtgcctttggaaagnatgtgggacactgttttaggatgcgagtatggatacatgccctttgcttacaaaggcaaatatacacccatctgtttttgggactgcggtttctctatccaccagaggaggcatctttaaatggattcacggacatttccctgaggagcttcctggccaggnggaaatcggcntggtggtttncaccatcgtggggaaggccctttttt

SEQ ID NO: 755 - DNA, 475 bp, Homo Sapiens
  misc_feature (162)..(162): n is a, c, g, t or u
  misc_feature (335)..(335): n is a, c, g, t or u
  misc_feature (386)..(386): n is a, c, g, t or u
  misc_feature (466)..(466): n is a, c, g, t or u
tttttttttttgcttgctttataaatcttttaattcttacaaccagctggtaagatgggaattgtttttgttttgatggaaaaattgggaaatgaagtgacttcaccaagtttatagagtaagcaagcgacagtcccaataggctgaattcacacctaggantttggatccagagcatagaacatttaattgtctcaatgcagcacacagtgcaaacacaaggcccagttgctgctgctattaacagtattgtattatgattatagtttttccctatttatctttgatgccagagtgcttacactctggcacctcttggggccatatggccttgntcattgtcttgtatcttggcatcaattacttttgcatataaagcttttttnctcttaacacaattggcaatttgtttaaaggactggacttccccctcaggcaggcaaaaaattaggtccccgggggagtngctcagtgg

SEQ ID NO: 756 - DNA, 408 bp, Homo Sapiens
  misc_feature (185)..(185): n is a, c, g, t or u
atttacttggaatggcttaggacagttctgactggaggcaggagtatggactcattaacctcctagccctgtaactctgtcaatctcaattctcaccagtttcaatcagatacagctgcctctagtttcattctggttggtttagtgtggttgtgtgtgctcatgcaattttctgcattgcaggngaaagaaagtatcttcaatatgtgtctatatctgtgcatgaggcagtgtgtatggtcagtctttccttaccgaaagtctcagcataaaatgtattgatagaggtgtacgctggtatataggaaagtaccctgtgacaaatatagttgattctttttatttctctttgcatataggatgaacacacaggctacagtgctctcaggagggcccagggagttgact

SEQ ID NO: 757 - DNA, 372 bp, Homo Sapiens
  misc_feature (75)..(75): n is a, c, g, t or u
  misc_feature (99)..(99): n is a, c, g, t or u
  misc_feature (108)..(108): n is a, c, g, t or u
  misc_feature (225)..(225): n is a, c, g, t or u
  misc_feature (350)..(350): n is a, c, g, t or u
  misc_feature (359)..(359): n is a, c, g, t or u
aattgtactgatattaatcctactactttcgtaataaaaacttttttaattcataattttcaaactttttgtggncatgaaaaattttcaaatattttnctataaggngattttaatttcaacttcaaggcatttttgataaacatgccttgtcccatctgtctgggtggttaagtacggtcttgcctgggatacaggggacagacctcataatccttcaagggncacttcaatctctgggatttctgataaaggtacagggtaaggcaattaatcaggaaatgcaggggctttttcctggacacccagcagggctgttggggtgtcgttggggccaaattcccccaaantggaggggngcttcttggggga

SEQ ID NO: 758 - DNA, 490 bp, Homo Sapiens
  misc_feature (131)..(131): n is a, c, g, t or u
  misc_feature (169)..(169): n is a, c, g, t or u
  misc_feature (215)..(215): n is a, c, g, t or u
  misc_feature (412)..(412): n is a, c, g, t or u
  misc_feature (419)..(419): n is a, c, g, t or u
  misc_feature (426)..(426): n is a, c, g, t or u
  misc_feature (436)..(436): n is a, c, g, t or u
  misc_feature (463)..(463): n is a, c, g, t or u
  misc_feature (473)..(473): n is a, c, g, t or u
  misc_feature (487)..(487): n is a, c, g, t or u
attcataattctacatggctcaggaggcctcaggacttacaatcatggcagaaggcaaaggagaagcaagcaccttcttcacaggtgtcaggagacggcacgtgcacaggggaaactgccacttttaagancatcagatcttgtgagaactccctcactatcatgagancaggatgggagaactgcccccatgatccaatcacctcccaccaggnccctccctcaacacgtgggaagtataattcaagatgagatttgggtgggacacagagccaaaccttatcacataccaaacatgctccggccttgggatctctgaactggctgtccgttttcccaaatcacattctctttaataaatatctacgtatctagttcccacattctccttcagatctttaattcaaatagnacttttncctgtgnaattttcccngaccagcaacttacttgggcaattccnaattcttctngcaacatgtttctntcc

SEQ ID NO: 759 - DNA, 370 bp, Homo Sapiens
  misc_feature (107)..(107): n is a, c, g, t or u
  misc_feature (320)..(320): n is a, c, g, t or u
tgcagtggcgccacctcagctcaccgcaacctccccctcctgggttcaagcgattctcctgcctcagcctcccgagcagctgggactacaggcatgagccaccaggnccagccttgtgatagatttttctagactgttgcatgtgtggtacacccacatacaatatcagctttagactcaaccctttgactttgccttcacctactgaacagcaacaaggattgtgacagaccaagaatctgaagaaggatgcagtgtgggagacgaaacaggtgtcaatgacaaaggtttagttgttatttcaagtcaactgcaaagtnggatgcggtatccaaggtacaggaaactgcacagggacttctccactaag

SEQ ID NO: 760 - DNA, 193 bp, Homo Sapiens
  misc_feature (22)..(22): n is a, c, g, t or u
  misc_feature (70)..(70): n is a, c, g, t or u
aatgaatacttagaaatatggnacacagataccatagtaatataaaatgcatacaattttaaattatttncttataaactctctacatgaatggctggcggcttccaacagataaacttttggacaaaggtacaagatatttttgggcattcattttaaataccatctagttatccaattaggaggtttctaa

SEQ ID NO: 761 - DNA, 364 bp, Homo Sapiens
  misc_feature (240)..(240): n is a, c, g, t or u
  misc_feature (252)..(252): n is a, c, g, t or u
  misc_feature (286)..(286): n is a, c, g, t or u
  misc_feature (306)..(306): n is a, c, g, t or u
  misc_feature (338)..(338): n is a, c, g, t or u
  misc_feature (346)..(346): n is a, c, g, t or u
  misc_feature (354)..(354): n is a, c, g, t or u
ctgtttaatatattttaaaatatggaaatatatttaaacagcacatttaaagaataaaacaatagacttccatttcttattctctcaatggtacaccattaattaaaaatatattacttaatgtaccccttaatatagttactgtcaaattttctttaagataaactgtatttcaaaacaacattttaatatacccgaattacaaacaaagccataacatttttgaagacatttttgggnatacgtttgggnttgaaagatccaaaaggatgattaataaatgggngctttatgaatactttaggnttaacgggtaaataaggcctaaccacaggggncacccttnaataggcnggttatccaa

SEQ ID NO: 762 - DNA, 423 bp, Homo Sapiens
  misc_feature (279)..(279): n is a, c, g, t or u
  misc_feature (372)..(372): n is a, c, g, t or u
  misc_feature (382)..(382): n is a, c, g, t or u
ttcttaattcaggaagagttttctttttagaaaaaaatactttaatcaggctttcaacaacattatccatgggtcagtggctgatactattattcctatttttcaggaggtggctggtctctccttgatttttgtttttgtttttgtttttgttttaaggttttagactgattgctatttgggcattaaaggagccataataaataatccatgcccactttaggttatctggtagatccacagaaattttaaatagggagggagagttagggtaaggancgacactatcaatgaccattttaggaactggggggggaaaaaatccccacaacaaccctggaaatgtcttctgtcattacagtttcaaaaacnaggggggggnaaaaaaggagggccactacttttacccgggggtcccctagt

SEQ ID NO: 763 - DNA, 386 bp, Homo Sapiens
  misc_feature (102)..(102): n is a, c, g, t or u
  misc_feature (357)..(357): n is a, c, g, t or u
  misc_feature (373)..(373): n is a, c, g, t or u
agacgggatttcaacatgttggccaggctggtctcaaactcctgacctcaagtgatccgcccgccttggcctcccaaagtgctgggattacaggcgtgacanccgcacccggccaaattttaaggctagctttattctgtgagacagtcaattgtggaaataaactaactttaaggattaaaatttaaaagaaaggaaaaatgtttaaagcttagtttcatttgcctaacaagcataaggcagctccacaatcccatttccaaaggcacttggcgctagatgaattttgggaatgcagaatttctcaggttttaaaaagttaatatgatatgatgcagcaattctatttctgggggnatattttccccaaatnatttcaaaggcgg

SEQ ID NO: 764 - DNA, 194 bp, Homo Sapiens
  misc_feature (102)..(102): n is a, c, g, t or u
  misc_feature (180)..(180): n is a, c, g, t or u
acaaatagagttctttttaaatgataaaaatattacactggacccaaaattccatacaaacattaatacatgatttctcatccattttgactaaatataggnttactgaaaatgtgctgtagaaaggccactctcctgtacagttgtgcaaagtctgcaaaacgatagtgattcaatggnggtttcaaaaggca

SEQ ID NO: 765 - DNA, 403 bp, Homo Sapiens
  misc_feature (19)..(19): n is a, c, g, t or u
  misc_feature (93)..(93): n is a, c, g, t or u
  misc_feature (161)..(161): n is a, c, g, t or u
  misc_feature (168)..(168): n is a, c, g, t or u
  misc_feature (233)..(233): n is a, c, g, t or u
  misc_feature (252)..(252): n is a, c, g, t or u
  misc_feature (402)..(402): n is a, c, g, t or u
cgttttcattttgtatttncctctaaatgaataaaatactactaataatatccaccaaattttgggtacttatgatgtaccattgtgcttgtntttttcacacattatctcatcatctctattacttgttgaaatccctactgccagcagttacataactnctttttnccctcattatatgaatgaccttctatgaatcctagaaccttagaacacagaggaatagtaaactnctgttattggttataaatnatctccaacaatggtgcttttgcatctacactctgcatttgattttaacatttcttcattctctgcactgaggatctccatattgcaggaacaccaaggccaagtgctcctattcggtccactaaggacagactttccggggggcaaatng

SEQ ID NO: 766 - DNA, 359 bp, Homo Sapiens
  misc_feature (254)..(254): n is a, c, g, t or u
  misc_feature (286)..(286): n is a, c, g, t or u
  misc_feature (320)..(320): n is a, c, g, t or u
  misc_feature (353)..(353): n is a, c, g, t or u
tgtttatatataggataacaaattcaggaacaatgggaaagtaatatatgaaaccttaataggaaatacaatagagattacaaaacaccaccatttgattttttatgcaaatacttcaatattccaatatttttactcacttgctaaataaagcacatgactcgaaatgctaaataattctgttagtctaaatcttttaaagaataaaatgttggtgaaaaaccaaaattgtttaggtaaggtatgtatgaccntgtttattatctatcatagacatcaagatgancataggttaataccaatttaaggctttacaggantactgttttagggcccaatattgatatattaantgaagg

SEQ ID NO: 767 - DNA, 453 bp, Homo Sapiens
  misc_feature (148)..(148): n is a, c, g, t or u
  misc_feature (326)..(326): n is a, c, g, t or u
  misc_feature (377)..(377): n is a, c, g, t or u
  misc_feature (408)..(408): n is a, c, g, t or u
  misc_feature (415)..(415): n is a, c, g, t or u
  misc_feature (442)..(442): n is a, c, g, t or u
gactgttacaactatagtctttaattgtacatatgcatgcacacttgttacacagatgtaaacttggctttgagtatatttatatatagcacaggcttagactcatgcatttggtaaatttggggcactagttgtcttattgcctggngaatactatagaaattcttttagaattttacatgcactaatcaagaaatatatgctagaaattcttgtcagttagatactgaggtaaatttactgataatgacttaggaagtgaaatctaattaatttaaaaaacaggtattaatttattaggcataaccccggatggcaggccaaangggccctccaatcttgggcctggtaccattagggaatccccttgggggggnaggtttttttaaaaaaaatccctggatcccnggggggnccccccaatgccccagtcctaggtttngggggctgggg

SEQ ID NO: 768 - DNA, 465 bp, Homo Sapiens
  misc_feature (154)..(154): n is a, c, g, t or u
  misc_feature (353)..(353): n is a, c, g, t or u
  misc_feature (381)..(381): n is a, c, g, t or u
  misc_feature (418)..(418): n is a, c, g, t or u
  misc_feature (428)..(428): n is a, c, g, t or u
  misc_feature (435)..(435): n is a, c, g, t or u
  misc_feature (441)..(441): n is a, c, g, t or u
  misc_feature (446)..(446): n is a, c, g, t or u
  misc_feature (453)..(453): n is a, c, g, t or u
  misc_feature (459)..(459): n is a, c, g, t or u
tttgtattcttataaatgtgtttaattacaactgcttcaaaagaatcccagcttttcaaaagtttattttaagtttggagactagacaaggtcatactggttttacatcctacgtgatataagtatatatacaaagaaaaaaacaacattggantattacacagcttgaaggtttgcaaaggttatttgtgtcttagttatttctgcacttaatgacacatcagacgcattgagtatatttcataagttgttgactaggcaaaggatacaatcattaggtaacccaagtcttcaaaattcacacccaaactttatggaggtcattcaggaaggaggaaggtcaatccctaaantttaaattggggccacctatgggataantccccttcaaaggggtggtggggatatatgggggggntggtttttancggtttngggttnccttnattggtnaaattnggcctg

SEQ ID NO: 769 - DNA, 419 bp, Homo Sapiens
  misc_feature (380)..(380): n is a, c, g, t or u
  misc_feature (414)..(414): n is a, c, g, t or u
tacttagtcagatatagcattgtggggcattcagttacttcaataaacatttatttgtaaatatttataattgcaatcagcaagacaaagatctttgctcttaaggaggtcacacagtatagtggacatttgtcctttgtgggggttgctgtccagcatatgaacccctttatttgggagagggggcttaggaatcttggtgggaagcaggtcccccttgcagtcagaacacaggcacatgaccttggctcacccaatccaaggatccatcccttggactgggagccagcgaccccaaagcagtgggaaaatctctgattgagacagctacggaaaatgtgcctttcagttctcccaggcatgggggaaatgttaaatgnaccttgggccctagctaggctgctagggtttctnaaata

SEQ ID NO: 770 - DNA, 389 bp, Homo Sapiens
  misc_feature (4)..(4): n is a, c, g, t or u
  misc_feature (383)..(383): n is a, c, g, t or u
attnagggggacgaatttatttctcatagttgtgaagactgagaagcccacgatcagcgtgctggcagactggtatcatctattgagggcccagtctcagcttctaggacggggcctgttgctgtgtcctcatatggtggaagggaatcgaagggcaaaaaggaggtaattggttcccttgagcccctttataaaggcactaaatccattaatgaggatggagctctcatgacataatcacctcctaaagcctcacctatcacgttggtggttgcttcaacatacgaatttggtgggggggacattcagaccttagccatatgtgatctaggtaggttctgctcctgggatatttatcccctaaagggaccctaagaaggggnctttca

SEQ ID NO: 771 - DNA, 512 bp, Homo Sapiens
  misc_feature (343)..(343): n is a, c, g, t or u
  misc_feature (374)..(374): n is a, c, g, t or u
  misc_feature (415)..(415): n is a, c, g, t or u
  misc_feature (468)..(468): n is a, c, g, t or u
  misc_feature (483)..(483): n is a, c, g, t or u
atctattcacactttaattcatttcaaagatgatttgggacataacaaccaatatatagtgtcaggttcatgactatgccaattgtcatgttgaggtccaaagagagtagatggatgaagagaaagaacactcagggagccttaggaggtgaaagatgattttattcagcagcagctctcatcaacagctttctcatcagcagcttacttacactgtctctctcgcactgtcctccctgtctcggctgcttgctctgaactgctcccacacacacagctgcacagccggttctcccctgctttcagggtcagcagcttaactctttctctgtttccctggggnacgagagacaagccaagccatggacctgggntccccctctgtccgtcccacaagacaaggacagctctgggntctctctctgtttctctggggcaccagtaccaagagccatgctgaggccatgnctaaggaggccaagncccatggcaatacttgtcagtcggggaaa

SEQ ID NO: 772 - DNA, 481 bp, Homo Sapiens
  misc_feature (87)..(87): n is a, c, g, t or u
  misc_feature (227)..(227): n is a, c, g, t or u
  misc_feature (246)..(246): n is a, c, g, t or u
  misc_feature (259)..(259): n is a, c, g, t or u
  misc_feature (261)..(261): n is a, c, g, t or u
  misc_feature (270)..(270): n is a, c, g, t or u
  misc_feature (277)..(277): n is a, c, g, t or u
  misc_feature (281)..(281): n is a, c, g, t or u
  misc_feature (291)..(291): n is a, c, g, t or u
  misc_feature (300)..(300): n is a, c, g, t or u
  misc_feature (305)..(305): n is a, c, g, t or u
  misc_feature (345)..(345): n is a, c, g, t or u
  misc_feature (415)..(415): n is a, c, g, t or u
  misc_feature (446)..(446): n is a, c, g, t or u
  misc_feature (452)..(452): n is a, c, g, t or u
  misc_feature (465)..(465): n is a, c, g, t or u
  misc_feature (470)..(470): n is a, c, g, t or u
  misc_feature (477)..(477): n is a, c, g, t or u
ttggtagaaatacattacttagtgagccaatgcaatgcaataatctggttggtaaaagagagtgatgtgattctaggacagagtttnagaagtacagcttccaaatacagggggaaatcatttcacttcactccacgttgatcaggcagcggctagaaagtaaagttgaaatcttaaggtcaagacctaagaaggaaagtgagacgctcagaacaaggtgattagantgaggtgcaggttttcctntgaagtcagggtntnttgcagctnttgatanttantactttaggntggaaaagnttcantaaatcatgttcttccctatgctgtgctgcgatcaatganttgaaggaaagtggggctggacagggggctggtgggtgggatgatgggagagaaggctcatctgtgccantggggagctttggccttagttgattgtgganttaggnaaattagcttaantttancaatttntggc

SEQ ID NO: 773 - DNA, 378 bp, Homo Sapiens
  misc_feature (151)..(152): n is a, c, g, t or u
  misc_feature (273)..(273): n is a, c, g, t or u
  misc_feature (281)..(281): n is a, c, g, t or u
  misc_feature (286)..(286): n is a, c, g, t or u
  misc_feature (309)..(309): n is a, c, g, t or u
  misc_feature (317)..(317): n is a, c, g, t or u
  misc_feature (333)..(333): n is a, c, g, t or u
  misc_feature (355)..(355): n is a, c, g, t or u
  misc_feature (360)..(360): n is a, c, g, t or u
  misc_feature (371)..(371): n is a, c, g, t or u
tagtagagatggggtttcatcatgttggccaggctggtctcgaactcctgacctcaagtgatccgcctgccttgggtcccaaagtgctgggattacaggcgtgcaccccaacctggccaatactgcctttttgaagagaccaggccaggtnncttgcagagtatatgatgcatatttaatgaacacatatttgtccctagtgtccataggtttcttactaaatatccactcagcatttactgagcaatttggaagtcatagacttaggcagtnggggactnaggtnggtaaatcaccttcaggttactnaaggaggnattatcaagcatgcgnaacaattaggaatgccaaaggnttttntgcccttaaangccctgt

SEQ ID NO: 774 - DNA, 431 bp, Homo Sapiens
  misc_feature (5)..(5): n is a, c, g, t or u
  misc_feature (7)..(7): n is a, c, g, t or u
  misc_feature (12)..(13): n is a, c, g, t or u
  misc_feature (18)..(19): n is a, c, g, t or u
  misc_feature (300)..(300): n is a, c, g, t or u
  misc_feature (309)..(309): n is a, c, g, t or u
  misc_feature (350)..(350): n is a, c, g, t or u
  misc_feature (359)..(359): n is a, c, g, t or u
  misc_feature (369)..(369): n is a, c, g, t or u
  misc_feature (398)..(398): n is a, c, g, t or u
  misc_feature (430)..(430): n is a, c, g, t or u
tgagntncgagnnacttnntgtcatgcaggctggagtacaatagtgtgatctcggctcactgcaacctctgcctcctggtttcaaggaattttcctgtctcagcctcccgagtagctgggattacaggagcctgccacccatgcctggctaatttttttgtatttttagtagagatgtggtttcacaatgttggccagcagtggggcaagacaggtattttagatagggcagcaagggaagacctcgtgactttggagtgaaaatgtgaaagaagcaaaggaattagtcatgggggggtntctgcaganagagcatttggggggagagaaaaccaccaaacgcaaatatntcagaagtnagcctggggnattttcaaggggcagcaggaggccacgtngcctgggagcctgatgccccaacaggggagant

SEQ ID NO: 775 - DNA, 352 bp, Homo Sapiens
  misc_feature (45)..(45): n is a, c, g, t or u
  misc_feature (62)..(62): n is a, c, g, t or u
  misc_feature (76)..(76): n is a, c, g, t or u
  misc_feature (124)..(124): n is a, c, g, t or u
  misc_feature (148)..(148): n is a, c, g, t or u
  misc_feature (173)..(173): n is a, c, g, t or u
  misc_feature (192)..(192): n is a, c, g, t or u
  misc_feature (226)..(226): n is a, c, g, t or u
  misc_feature (239)..(239): n is a, c, g, t or u
  misc_feature (249)..(249): n is a, c, g, t or u
  misc_feature (256)..(256): n is a, c, g, t or u
  misc_feature (305)..(305): n is a, c, g, t or u
  misc_feature (320)..(320): n is a, c, g, t or u
  misc_feature (327)..(327): n is a, c, g, t or u
  misc_feature (336)..(336): n is a, c, g, t or u
gaaatcaagttgtttattagtcttgtgttcacccatgtcatgcanacgaagattgaagagcngaaaacgctttganattctccactgtaaggcactgtgtgaaaccccgcttaaaactattccnaccattccaccaagggactttccnttccactgacaagttgaaggagganttcagagacagtgcttccntagccaaattgtttcattgttcaagtatattganagggtggttgccnaagcagaaantgcaganttaaacgaaggaagcttgttttgagagcaggtctgtcaccctctatggnacatatgacaaggangtaaacnggaagtgcngaattggcttggttta

SEQ ID NO: 776 - DNA, 421 bp, Homo Sapiens
  misc_feature (55)..(55): n is a, c, g, t or u
  misc_feature (87)..(87): n is a, c, g, t or u
  misc_feature (95)..(95): n is a, c, g, t or u
  misc_feature (118)..(118): n is a, c, g, t or u
  misc_feature (130)..(130): n is a, c, g, t or u
  misc_feature (142)..(142): n is a, c, g, t or u
  misc_feature (148)..(148): n is a, c, g, t or u
  misc_feature (165)..(165): n is a, c, g, t or u
  misc_feature (274)..(274): n is a, c, g, t or u
  misc_feature (333)..(333): n is a, c, g, t or u
  misc_feature (375)..(375): n is a, c, g, t or u
  misc_feature (394)..(394): n is a, c, g, t or u
  misc_feature (408)..(408): n is a, c, g, t or u
gtctcactctgtcacccaggctagcatgcaatggcatgatcataactcactgcancctcgaattcttgggctcaaatgatctacctncataggtngtactacaggtataggcctctangcctgactaatnttatttattttngttttncatagagttggggtctngttatgttgcccaggctagtctcgaactcttggcctcaagtgatcctcccttcttggctttcccaaatgtcgagattacaggcgtgcgtatggcatctggccaaaactngccaacgttgaatgagtatgttaattcacccaatttaaaaatcccagccgggcgtgatnggctgatgcctgttaatcccagcactttggggaggctgaggngggtggatcacagggtcanggagttcgagaccngcctgggccaata

SEQ ID NO: 777 - DNA, 394 bp, Homo Sapiens
  misc_feature (22)..(22): n is a, c, g, t or u
  misc_feature (26)..(26): n is a, c, g, t or u
  misc_feature (54)..(54): n is a, c, g, t or u
  misc_feature (56)..(56): n is a, c, g, t or u
  misc_feature (59)..(59): n is a, c, g, t or u
  misc_feature (77)..(78): n is a, c, g, t or u
  misc_feature (360)..(360): n is a, c, g, t or u
  misc_feature (384)..(384): n is a, c, g, t or u
gtggcccctaggacccctgtangcangtttctctcgacaggggtggtatgaggnanganaaatatggagcggggaannatcagaatttaagaatctgcgaagggagatttaggtaaattggcctgagttggtctcttcctttctctttcctgctccgttgtagttttcatcattctctgctctgggtaacttgcagtgcagaggaaggatttcctctcactcttagctgaattagcccttggacatcattttccaagtctgtcttggttcttaacaagccgctgccattttgtactctgtggtgtcagctgccctaagggctctacaagataaagggtcttcacaagggagctcagagtngcttattactccacgtattttctnttcttttcag

SEQ ID NO: 778 - DNA, 557 bp, Homo Sapiens
  misc_feature (488)..(488): n is a, c, g, t or u
  misc_feature (519)..(519): n is a, c, g, t or u
  misc_feature (556)..(556): n is a, c, g, t or u
gtaataaatttattgtattttgttacattttccacttttctcttaattccaactgtatactatataatcaacgctgtttcagaaataaaatgtttcaaacgtaaaaatataaattctgcttcttaaaagtgcatacactttgaataataaaacatacaaataaataacagaaatcagtgacacatctcatgcacttgttctaaaataaatttaaaatgtacgatacacttttcttccagcctctaggaaagacatcctgccttccatattactgtacaactgaaaatgaaaacgacacagaaatcactatccacggtgcatgagtaataccaaagcactttgtgttacagtgatgtgacatgcagctttcaagacaactacagaaattccagtggtaaaaactggaagagttcaatccaagaaacgacttatgtcaatgggggcttaaattccaattttaaccagtggtggagagggcacagttgggnggagcaggccccctatggggatggccaaccncgtatttgggaagggcctaccaaggaggactccccant

SEQ ID NO: 779 - DNA, 234 bp, Homo Sapiens
  misc_feature (134)..(134): n is a, c, g, t or u
  misc_feature (166)..(166): n is a, c, g, t or u
tgcttgataaaggtcaatttttatttaaaaagtaagctttcagaatcaattcagtggtgctacaacaatcatggaattattaaattgtttttcaaaaagcttgtaaggaaaaataatatagaacatcattttgnatatgaagtccatatttgccactcgaaatcgncaataaaacaaatgctcggcttcagaagaaaagcctttacattccacaatcataatttgatacttcta

SEQ ID NO: 780 - DNA, 318 bp, Homo Sapiens
acagttcctagagatttattataatctgtttcttctttggctttttgctttgccccatatgcacacatagtagagatttctataatctgcattcttctttggcttttgttttgccacatacacacacatactcaaataatcaagtggcctaaacacagagattagaaaccaatcagtaagaaatcagaagccctaccagtctacccctccccgaccctgcatctgatgtggagccatagtcaagtgcctaggaggaagacaagcttgaaggacgacccttaataaagagcttctaggaaagttcagagatctcagaag

SEQ ID NO: 781 - DNA, 292 bp, Homo Sapiens
  misc_feature (291)..(291): n is a, c, g, t or u
aagtagttcagattatagattatagattacagacttccaagtagttcagattattagctgtcacgcccagctaatttttaaaatttttttgtagagacagggttctcaccatgttgcgcaggctggtcttgaacttttggcctcaaaaaatcctcctgctttatacttccaaagtgctagaattataggcatgcatcaccatgcccagcaatttactttctttactatgatttcaattttagacatgtcaggggcctccctggaataactgcactttttagaaataaaggna

SEQ ID NO: 782 - DNA, 440 bp, Homo Sapiens
  misc_feature (145)..(145): n is a, c, g, t or u
  misc_feature (340)..(340): n is a, c, g, t or u
  misc_feature (362)..(362): n is a, c, g, t or u
  misc_feature (399)..(399): n is a, c, g, t or u
ttaaagcttaaggacatttaataatgtagaagtgttccgatatagataaacatctttccagaatctcaggtaaagaacatcttggctgaactgacaacgaatctttttgagacacaacgtttctgttcccaaaatgattacatcngacaacaggtgcaggagggtagaacaaagaaagaaccgcggagattacattacaaagatatatgtttaaatgagatttgtaaacttaatttgtttgcaactccgggtgcaaagaagagaataattatttttctctatactgtagttaattgaacttaagtacaactgtggaaagtatatttaaaaagttagaccngattttaccaattttaagtttngatccaagtgttttcccagtttggctaaatcctaacnggggttaaccccctagcaagttcccctaggggcaatggaaa

SEQ ID NO: 783 - DNA, 457 bp, Homo Sapiens
  misc_feature (456)..(456): n is a, c, g, t or u
tttttgtggttgtttttgttttccctttatttatccaaacatttacaaactccctatgatgcatcagacactgctaagtactgttaggagacagtgacaaattggatacagtttttggcttcaaaagacttacaattaaaggaaggataaaacctgtaactaccaatgctcatatagggaagaatgagtgagtcctggggccaagatccaagaatatctgaatgaaatctgcatcattccatggcactacatctaccattacatatcacaaaacaaaagctgttcttcctttcctcagaaacacggctgcatcaggtctacccaggtagaccacagaatgatgaaccaaaacagcccttccacggttgatatacaaagacaactcccaacccctggtggatagaaaggactgcatattttgaaaactttacaataagccaagtgttccatgcctcnt
